United States Patent Application Publication US 2026/0191916 A1 - sequence listing, part 22

SEQ ID NO: 40 - DNA, 7086107 bp, Bacteroides cellulosilyticus (residues 3,543,055-5,314,581 of 7,086,107)
  source 1..7086107: mol_type = genomic DNA
gataagatttttacgcaccagtacattgtagtaggtttccgtcctgaattcaaggtttccaagcatatttctttgcctgttacggtggggataaatgcggtacgcaatgcttattatgatggcagaagcttgtcagcgttctttaaggcgatggggagggaatatgatccttgtttccagatagcaccgtatttctcggtaagtattgtattgcagtaagttgtatttccaaaaacattgttatctttgtacttgtaaacggaaagcataggaggcaacctgatgaaaactacagaagaaattcttaatatcctacgcgagttcaagcatactgcgggtgataagtacggaatagagcagatagctttgttcggctctgctgcacgtggtgagctacgggaagacagtgatattgatgtttgcgtgaagccacgcaaggctatcgattactttactctgcaagatgtcagggaagaacttgagaaactgtttcaacgtaaggttgatttattaactctgcatgagaatatgcgacagctattccggcaaaatattgagcgagatgcaatttacgtctaaagaagaactggcagatatgcttcgctttgttgaacgccaaacggtgtttaccattgagactactgcaaagatagaaacctatcatgactttcttgcttctcaggaggccatggtattatttaattctacctgtatgtgtttacagaccattggtgaaactattcgtagagttgatgaacgcacaagtggaagactttttgcctgttatcccgaaacaccttggaagaaggtaataggtatgcgcaatatcatttcgcacgaatatctttcaattgatccgcaagtgatttttgccacagtgaaaactcgtcttaatccgcttttatctgatctacgccgggtattgtctgatattgatgccggtttgagagatgaggaattgaaataatatattaatcagcgattgttataactaagacgctgtacgcgcacaacacccttaactccggcatcaggatattttgtcttataatactcagtcaaatcctcgtaaaaccaaaggcgattgaaagaagagccggcaatttgagtgataatggcatcgtaccagcgtatcatttgttcagagcccgatggaaagataagagtccattttacatacgtaacgatttgctcatttggcggcaataatttataggaagcaggaagttctgcttgagaaccgttctctctctgatacatcccacttaatagtgtagtataatctgcatcaacaagtgtccacgttgagagttcttcaaatacataaccgctgccgacaaggtgcgatgaagtatttcgtaaatcatcttctatgatacttttgagttccgcatcaaccgcatacgtaagttgaatcttaaatggtgctttatgttggaatataatttctctcaattcatacctgactgtagacccgtcagtggagggattttcaagaggggttaccttaacctttaacttgtaatcatatcccttattatattcaaaaccttctatttgatttggagctatatataatttttcattatctccctcaatactacataccataacttgaacacgagagtctctcatccatactaactcaggtgatacagacatgattgcaatattctccacactatcatcatccttgtcacaactaataaaacagaatgcgtaaaggaataataacattatcccaagtctttcttttgctctcataatactgatcgaattaaggtacaaaattatttaatcgcaaagtaaggcaaaataaaggataggaaccttgatttgaatcaagattttcctttcaatacaatttttcttctgatccggctcaaggtttccggtgtaatcattaaatatgaagccatttctctgagtgttatcctgtttagtacgtcaggacatttggtgactaatgatagataccgttcttccggagtatcgcaatatagagatttaagtctctgtgccattgaaaaaagaacaacttctgctatccttctgccaagaaactgagcatccatgctactattgaaatatgaatttatctcagatatagaaagtgtatatatgacggaactttgaacagcttgtatattagaaattgcgtaacaattattctgcaaaggcgaataattgccgagaatttcgttctcaaatgcataagacaaaatatgctcttttccatcggaatcatcacaggtgtatctgaatgcacctttctcaagataagctacaaaagggaaattctcttctgccctgcaaaaatactcgtttttttctaaggtaattttcttacccttattaagaaacagatgaatgaaatcgctaaaatcgagtatttcattgtatatattgaattctcccataagcgtactgttttttatttgaacaaatgtacataaaattcatctgtttctatatcagtcttataaaaaaagtaaggttatcttcttttctattgtctttttagagtagcctgtgcctactgtcagacagaatataccacctcatgtgcctcccccagttgcggaacttccagtttcccgagcattgtatccagtaccgcttccggaaccataaattcccgttcacgattttgtttcctccatatctcatacggcttttcgatataaacaatcttcactttagccccgtaagtgaggaataaatcaatcagttgcgagcgcatctgttttgaggtattggttgcattccatacaaaaccttgctctttacgcagatagctgcgagctttttccttggcttcctgtaccaccctgccattggcagccttatccgtagggctaactttgtactttcgccggatagcatcgaggcttatcacaggaatatcctgcggcaatgtacggatataatgatctttccccatccctggtaaaccggataataagataacttcacaccggaaattatcatgtggaatgtaatctatatacccatcctcagcatgaaagtactgaaagcgggcatgatccgttgcaaaacttcgtgcctttccccagcaatcctgttcacggcaaagcatctcgaacaactcggcagcctccatcagtgcaggcttatctttgcagatacgtccctgaatatccgccattgcaagcattttcagtaaacgtgtattcactctgagagatgcttcacacagcttttttacaggattctcccgctccattatccaaaccggcaaaccatgataacgcaccagcgcagcaatgttctcccggatatgaaacggagtaggaatatccctgtaaaggatcgtgcgtgccgtatattccccacgcctggcatgtcccttggaagtgataatgccacctccttcatctaccgaagtagagcgcttttccacatcatgcaataaagcggctgcccacaatatttcctgttcctgtgcaggtaaagcccgatattccggctgttgctgcaatgcctccagtaccatgcgggtatgtacggccacactaccttcttcgtgatgcaaatggtgctgcatcacgaagttcatatcttgtacccaccggaactgttgttccagtgagtcccaattcttattatctgtcagtttccaattcattttattcctcctttcctatttcccagatgaggcgggcacgtttccagttgcgtgtccagtgctcatcggtcttcacatgccctttgcgtacgtacttgaatacgttgcgggcaaattcgcttacaggatattcacctatattacgggtgactaccccttcgcgggtacaatctgcacctgtttgcggatcgcgtgttccgaatacacccggctcttgcgccagactaacgatctgttgctgcaacgcttcccgcgtcaattcttcaaccgtttccactcgtaattcgggtactgtaggcaagtcgaacagagcggcatagaatttcacttcctcccacgatagccactgatccagacagcgcacggcaaacacatagaaatgcgtttcaagtttgcgatactctatcgaatgtatggcatacaggttttcaccgaatatctcgatgtcccccaaatcgtttttcatgagttcccaacgctcgcgcagctccctggtccacggtgaggtagtgggtgctgcgtgcgagcgggcaaatacaccgtggcggctcagacaattattttctccgtccagcttttcggtgtgtatcagggtttctatctgttgaatgtcttcccaatacgtatggttgatgcggtcgtcactggtcgttccgggagaaaacggataatgatacgtgcgaccatatttttctgataacataagttgctcctttctttttaaatcattcatctactttaaatcagcggctcctggatcactttcaccggattgccacgttgcaggcagttgtgattactccagttggcctgtgcttgaatcatggcttgctctatgctccatgatgccagtttcaacagcaggcgttcggtggccagtttcttgttttgccattgcgagcgttggtcggaagctaccacgctcattccggtaggaatatggacggcacggacggcagactccgtcttgttcacgtgctgaccgcccggaccggatgcccgcaaggtctcataacggatttccgcttccgtagcctcctggctttcggagagcgtgaaggtctgcacaccgacaaaccagttcttccgtttatgataaatgcggtacgaacttttggcaatccactgcacggtaccttcccagtcctcaatcagcgcatgataatctccgccttgcagagagatgacggctgagagcagggtacggttgagggggcccgtttcgcgttctacgatttctgttttcactcctttggcggcggcttgtttcagaatcttttccagtaccagcgccactacgcggcaacattcggcagggccgcgtccggaggttatttgcatatatactttctccatagcctcttactctttattcatccttataatgcgcggcatgaatttgccctgcacttctaccaatgtctcttggggttgcatcacccggtcgatgttcttgtaggctaatggcatctcttcgatgctgcccccaatcagtgtgaccccagcctgcgagagaaatttcttcatggccgactgggtgaaactctcctttgctttctggcgcgacatggcccgtccggcaccgtgcgaagcggaacataacgactcttccacaccccgacctgctaccagataaccgggagttgccatgcttccggggataagtcccggttgcccagcctgtgcaggagtagcccctttgcgatgcacgatagcggtgcgtccgggtgcaatctcctctttccaagcgaagttgtgatgattgttcacgttcgccattggcttcattcccagagctttcgagaggttcaggtggatttgttcgtgacaggcacgggcatagtcgcctgccaggttcatgctcatccagtattcctgtccttcttccgagttcaaatcgagccaagcaaaatgctgtgcttcacgtggcagtttgcagacttcacgggctatccggctgtaatgcatggcaatagctgctcccagtccgcgcgaaccggaatgtgacagcaatgccatataattgccttcgggcagtcccagcacattttctccttgcagaagaagctctccgaactccacgaaatgatttccaccgccggaactgcccaactgacggatggcctttccgcgtaagtcccttagaagaggggtcaattgaaattcttcccgttctgtcacttcatgctcctgtgcaaaggtcagaccgccctccatgccgaagtgggtatagtctttcagtgcctctttgatctgatgcgagtatcttttcagataatccgctttggcatcgaacaccgtcaggctcatccggcaaccgatatccacccctacggcataggggatgacagcattgtccgtggcgagtacaccgccgatgggcagaccgtatccggcatgtgcatcgggcatcagtgctccggctacgctgacggggagtctcatggccaggttcatctgctgtttggcgagggtttctatgaacttgccgccataggttttatagggcaacgtctcgtcgagcaagtcgtatgctgtgaacttcttttcgatgagggtgggggacaggtgttcggccagtttgccccatgtctcattctctttataagtatcgggattttccagcacgtcgctcagtgtcttgataatctgttctttgctttggtgcttgcaatgtttaccgacgatggctactgccagactgcgtgctacattgtctctatatcccagcttacttaaatcttttaatcgtattcccatattttcttttttcatgtgtacgcatacggcatgggctgcccgcttcgcgacgagtcagtgcaatatgcgttttgtatccaatgcatgagggatgatgatagatacaacgctatccgtccactgcattgaagtgaataataataaaattataaatgtgattgtaggactaatcaagaaaattgcaaagccccatcatcccgatgagtcaacttagtcctggctgagatattatagttccaacataaattagtccctttctttcagttttaaaggggtgaatactgtgtttaacggtggcaaaagtaatgtatctttttaaagtacgcaaggaaaaagaacgtttttttgcagatgtaaacagtttagggctttttacaatatcaattcttgaagtccatgtgaggtcgtccggactgaacaggtcaatcgtctttatcccaccattcccggcattcgtcggatatgggagtagcgggtatttctttgtatcattattagactgatccctgtatcacaagattagttttttgcaacacagggaaaaatctcccatgcaccccgcgtgaagtcgggtatttctatcgggcgactaccattcaataccgattgttcactaagctcggtgatgcacgaccattcggcggcatcgtagacgtccatatccaagggaagcccgtggtgcaggcagtagatgagacggtaatccatgatatagttcatctcgttcggaacacctttgcgggctccttctttgccgatggtagctgtaaaaggatgttgatagcgttgcaagagctcttcggtagttacactgtctgcctctccgctacacacatcttccagactgattgtggctaccggatatttctgtgcaaaccctcgcgtgccgcagatggtgtgcgaacggctgtaagggcgtggatgaacggtgcagtattgcagttggatggtctttcccttgacggtatggatgagggtggtgttcatgtctcccaacaggtaagcctgttgtgcttcgggagattctttgccgaaagtgcggcgggcatattccgtcattcccgcctggtgggtggacatggatacaaggtaattcaaacggtcgcctcggtgaatgtttaggatctggcatacggggcctaaaccgtgagtgggataggggtttccggtgtgttccatgcagtaagccttgttccagtggttatggaaaccgccttggttttcatcgctgaagtatatggagcgcaggtcgtgtatataagcaccttccacatgcatgatttcaccgaacaggccttgtcttgccatgttcagcgtggtcagggcaaaggcatcatagcaacagttttccagcatgatgcagtggcggcgggtacgttcggcggtatctaccagttgccagcattcggctacggtcatggcggcgggcacttcgatggcaacatgcttgccttgctccatagcgtaggtggccataggggtatgcgtcagccagtccgtacatataatgatgaggtcgatatcagggttgcaacacatttgttgccagccgttttctccggcataacctgttgcagcgggatgtccgccttttgtcagtagggcctgtccttttgccaggtttccggggcgtatctcacacaaagctttgatctctacgtgttctatgagcatataacgctccaatgtgagtaatccgcgattacctaagcctatgaatccgatgcgtacaacgggaataggaggatgagccaggcccaggacatgagtaggaggttcgtttttcattgaaatagtgtataggttaaattgaaattgctacaaagatatttattctcattaaaaaaagctgcctcttagaagcagctttttagaataaaattgaaaatgctttttgaatagcaaggataattatactccgctgaatgcactaaatccgccatctattggcagcaatgcacccgtcacgaaacttgccgcatcgctgcacaggaattgtacggcgccgttcagttcgttgatatctccaaaacgtttcattggagttttggctaaaactttcttgctgcggtctgtcagcgaaccgtcaggattgataagcacggcacggttctggtcgccgatgaagaaacccggagcgatagcattcacacggatgccgtctccgtatttcagtgcgagttcgcttgccagccactgagtgaagttggcaacggctgtcttagctgccgagtaacccggaacgcgggtgatagcgctgtaagcagccatggaagatacgtttacgatacaacctttaccttgcttagccatcactttgctgaataccatagaaggataaacggttccgttcatattcaggttagtcactttctcccagcaggtaacgtccatgtcgaagaagttctggtcgggagccagcgtagcacccggcatattgccaccggcaatattgagcaggatgtcgatacgtccccatttggcaacgatgtcatcagccaatttttcaaggctggcaatgtccaatacattacctacgatgccgatcacatcttcaccgtaagctttcagttcttctacacgtttgtccagttgttcctgacggatgtcaacggctactactttggcgccttgctccatgaaacatttggcaatgctgccacccaatacaccacctgcaccggtgataacggctactttacctgcaatactgaattgttcgttcataatctccttatttaattattagtttttaattgtttatttcgtcttgcaccactgccatcattccttctacctgtgccaatgccagcatacggccatggaatgaatatccggggttatatcctttgtcttcgtcacccagcatcattcgtccgtggtctacacgcataggcagtcccggattttctttctcaaagatgcggatgaggtcaatcagatgtccgcgtccggtcaggtgcgagctttctataaagttgcctccgggcatggcagccgtactgcgcaggtggacaaagtgagtacgtttagcgaatttctttgccaattcacgggtatcgttatgctcgcctgcactgagggaaccggcgcagaaggtcagtccgttatgcgggttatccactgcattcaggaaccaggcgatgtctgcttcgttggtgacaatacgcggtaaacctaatacctggaacggaggatcatcgggatgcacacacatatttacaccatattcttcgcagacaggcatgatggcggaaaggaaataacgcatgttttcgcgtagcatatcacggtcgatacctttatagagtgccaacagcttcttgaagatgttcaccggattcttatctccttctttgatatttccgttgacgaagccttgcgtctttacgatgatcgtgtcgatgagatcatccttttctgcttcggtaatggtcttgtccagttctgcaacctttgccagttcttcggcggagtagtccttttcggctccttcgcgtccgaggattcgaaggtcgaagtaagcgaagcgaacacggtcgaagtagagtgacgaagtgccgtctgcccaaggatgttgcaaatccgtgcgtatccagtcgataacgggcataaagttatagcatacggttttcacaccgcacttgcccaggtttgccagactgactttatagttttctattaactgttcacgttccggtccggcatacttgatcgcctcgcaaacaggtaggctttctactacagaccagcgtaagccgtacgactcgatataggttttcagatcgttgatagcctcttcggtccatatttcaccattgggtacatcgtgcaaggcagtcacaattccttccacgccgatttgccgcagcatgtcgagcgtgatcttgtctttcttgccaaaccatctccaggttttttccataacatttatatattaatagtttaactgattattgactgcaaatatacgtgcaaaaataatgctgcgataaatggatttttgcagaatatatgcggatttttgcatatatgcggtggcatttctattgtctttccttatctttgtgtgtgaattaaactttgcagaatatatgcgccgaccgattataaatgaaaagttgcctatatcggagtcgaatccgatcaaggctcggcattacgattatgatcgtttcacttatccgtggcatttccacagtcagtatgaaatcatttacgtaaaggagagtcatggtctgtgctttgtaggcgactgcattgagaagttctctgcgggtgatgtgattctgttcggtactaatctgccccattacatgcggagcaatgatatttatggttcggagaacgtcacttcacgcgtgcaagggactatcattcagtttgagcagaattttatgcagtattcctttgattattatccgcagtttctgcaaataaaaatgctgttggaggaatcgaagagaggtatcatctttccgaaacaggatgcaacccgggtaggggagttgctttccggctttctttcattaagtggttttcaccagataagtggattgctggatttgttgcaggagctggcagtcagtccgcaaagaaagacactggcaagtctgcattattacgaaaagtttcctacgctggggaacaagcggattgataaaatcatttcctttataaacaataactacacccgtaacctcaaattgaatgaaattgccggaatggcgagcatgaactccagcgccttctgtcgttactttaaggagaatacagggaagacgcttttgcagtatgtgatggaaatgcgtgtgggatatgcttgtaagttattagcattgggagaaatggatatctcgcagatagctgtggaatgtggcttcgattcaatcactcatttcaatcgcacgtttaagcagttggttaatctgacgccgacgcagtataggagtaatattatgaaataagggggaatgtttctgaaattattctgctcgcaatgaaacattctttattgtgatttgatccaaattaagaataatatctactgattccggcagataattgttgccttttgtcaatagcagatttatgtattattaacgggaatactgccaagatgagtgtcatgactcgaatgtcttgtgattgtgaatttctgatatcttttgcctgtggttagcgaggcaaatgccacactttattctcctctatgccacaccttagtccgctgaatgccacatgtctaaactgttgaagtgtggcattggggacgacggagtgtggcattacggttgtacaagtgtgggctcacgcttatataagtgtaagcccatgcttatataactgtgagctatcggagcctgctgtgttgagggaataaaaaaacggggaagcagttgcttctccgttcctatataccgtgaagtgtagtttaatgcaaagttgaataaagattatctataaaaggatgatacaaagatacgatattgagaaggcgatgtcaagtgtttcgctaattatttccggtttgcatatttgttttttagcttcttgtattcttctcctaccattgcatataacatctactctttgttaggacagttggacttagatatgcttttattgaaatctcaaaacttggaacttacagatatacctctatttttctggtaagaggaacatctatttttagaatgttgtatctttgcaaaaaacggtgtatgaaagatgtacttaaaatatcaatcttactaattcttgcacttagcaacggggctttatttgcacaggcgaatagatctctcaatttaaatagagatacgttagatctaaaatttgtaaaagacacgttggtaacgagtacaatccaagatacccttgctactatacctgctgttaaagattcaataactgcaaaacaagatgaaattaatgactctgcattgtattatcggctaatcttacattaccgagacagtgtgaatcacaatcttaaaagaatatacaataaagatgcctttaaatttaaggatgattattttcgagaaaaaatgagagaaccgtggataggagatgttttaagatatatatttttaaaataattatgaagttctattttttatccttatgtataatgcttgctgtcagttttgctgctaaagcacaatcaaagcttatttttaaagataagtttatgtatacggatgtacaggtgttcaatgagacaaaaaggcactcaataccctctctaattgatacgggttgttcgttatgtataattgattctatttttgctattgattcatgcggaataaaagaagatgaattacaaacaattcctattaaccaaacaaaagataagatttcaagtgcttttatagattctatctttttttgtggaaagacatatcataaagtgtattgcttagttgcagatcttactgggcattatcaaaaatatgcaccaaaatttatcgtcggggctaatatccttagatcaggagcttggaaatttgatatggaaaagaatattgttgaaccctacgattctaataataaagcgaaagggactatttataaatggaaaaaccatgaagactatcctgatgtggcaatagattatatcattttagatagtaaagtcaatggaaaaaaaacacgatttgcctttgatacaggatgtagaaacaataaacttcaacgtggtttatatgtaggaaaacctgagcaaattcaaaaggaaacagctaatatcgtaaataaattatcaattaaggcggctgaattatgtagaaatgtaacattcaagataggaaaggatgagtatacgttagattttataataggtgatggcaatattgggctcttaaacatcgaattcttacaaggccattcctttatacttaattataagaagcagatacttgaattgttgtaaaagagagcttgaattataatttcaatctatttagctcggagagaaattcataggttattggaattggaaatcttatcagtccttctgtctgtcttctcttataagtctctgttcgttcaaacgttcctgttgcttccttttctcttctaacgatgcggtagcttgcccaatgagggtattgattgatgagtgaactctatctattacttgtgaaattcattaatatattccataaaccttatgattatgagtttcagatgtaggtaatcattttcttttgctaaagttttccatttgtagcacgctacgttgattgttgtgttcataagattttggtttaactcactcggtttacatcttggtttacatgcaacctctgaaaccgcctaaatttgtagttttatggactatagaaaaagaaaaatcctgatagctaattgcttgactatcaggattctctctaagagcggaagacggggctcaaacccgcgaccctcagcttggaaggctaatgctctatcaactgagctacttccgcaattttagtgggcaaagatggattcgaaccaccgaagtcgaaagacagcagatttacagtctgccccatttggccactctggtatttgcccttttgcactttgaaatctatctcaattctctcattgagtagctttgtttctcaattgcggtgcaaagatacgactatttttgtaaactccaagcaaaatcgatcatttttattgcagtaattgcacattcgtcacctttgttacccagtttaccaccggcgcggtcctcggcttgctccattgtattggtggtaattaatccgtaaataactggtacgttgccagttgcgttcagttgagcaattccgttggtacttcccatacaaacatagtcaaaatgtggggtatctcctctaactacgcaaccaattgcaataactgcatccacattactatattcaatgaattggttggctccaaaaattaattcaaagctacccggaacagttttcaccaaaatattttcgtctctggcaccatgtttttttaaagtattcattgcgccctctaaaagttttccggtgatattgaagttccactcagaaacaacaatgccgaacttcatttctttagcgtcaggaacagagttgaagtcgtagtctgaaaggttatgataagctgttgccatagttattctaaaattaataattaaaaataaaaggggataaaaaagaaacggattacacggatttcacggttgtttcttttttatccgtgtaaaatctgtgtaacccgtgtctgatatactatataataataaggtatattacttcttcagcagtttggcttgttcgatgtacttatcgatatccattgactggtaagaacggaaatatttgtctttaatcttggtatatgctttgatagcgtcgtcatacttgccttgcttaacgaggatttctccggcttgttgcaggtagataggactgagtgaattgttatcagcttcgtcagcagcactcagcaacatagaagcagctttgtccagctggcctaattgtgcgtagcagttacccattgcacctttcattgcaggagctatcatctggtcttttccgctgaagctatccagtgcttttacagcagcttcgtattgtcccaggtgagcgtagcagatacccatatatgcttttgccaagttggcagctttggttccgctgtattcatcagcaattttagcgaaacctgcgaatccgatactgtcgccattcaatgcctgttcgtaaaggtcggcctcaaagtattcctgtcctttgaacaatgcagcctgtgctttttcttcgcgcggttcagcataaaggttcttgtacattactataccggctacgatgatgattactgctactacagcgccgataattgcttttttgtttttaatgagaaatgcctccgattgtgacaatgcttcttccacattcagggcttcgttagctttcttttgttctgccattttatatattctttttgttattattcttatttagccatttcgacccgcaaaagtaacttttttataggtatcaacgaaatttagcggcatctttttttcttttacacttgaaaacccgaaattcttcctactttttgatgagctaagcttcacctccgctattaaaaataagcatgcttattttgtactgcattcggtttagataaatctctcacattcggaaaaaagaatgaattctcttttcgctcactaaatcgagattttgcattatctttgtaactgaatttactgctgtaatatgatactgaaacgtatatccatacttaattataagaatctggaacaagttgagctctcgttctcacccaagttgaactgttttttcggacagaacggcatggggaaaacgaatttgctcgatgccatttatttcctttcgttttgtaagagttcgggcaatcccattgattcgcaaaacatccgccatgatcaggaattctttgttatccaaggcttctatgaagcccccgacggtacgccggaagagatttattgcggtatgaagcgcaggcaaaagaaacaattcaagcggaataaaaaggaatatacccgcttgtccgatcatatcggattcttgcctttggtcatggtttctcctgccgactcggaattgattgccggaggcagtgacgagcgtcggcgctttatggatgtcgtaatttcgcagtatgataaagagtatctggaagctctgatacgctataataaagcgttggctcaacgaaatactttgctgaaaagtgaagtgccggtagaagaagagctgtttctcatttgggaagagatgatggcacaggccggtgaggttgttttccgcaagcgggaggcttttatcagtgaattcattcctattttccagtcattttattcttttatttcacaagataaggagcaggtcgggttgacttatgattcgcatgcccgtgatgcatccctgttggatgtaataaaagcaagtcgtgtgcgtgaccagattatgggatactctctgcatggaattcacaaagatgaactgaatatgcttctgggtgatttccctatcaagcgggaaggttcgcaagggcaaaacaagacctatcttgttgccttgaaattggcacaatttgatttcctgaaaaggaccggcaccacagtacctttgcttttgctggatgatatcttcgataaactggatgcttctcgcgtagagcagatcatcaagttggtagccggtgataacttcgggcagatattcataacagatacgaaccgggaacatctggatcgcattcttcataaggtaggcagcgattacaaaatgttccaggtagatcaaggagtcataacagaacgggaggaggatgaagcatgaagcgtaacgatgccgaacaaataggtaaactgatacgtactttccttcggcaggagagtctggagtcgccactcaatgagcagcggctcattaactcatgggcagaaatccttggccccactattgcctcttatacccgcgaactctatatccgcaatcagattttatatgtccatctgacctctgccgccctgcgccaggaactgatgatgggacgtgacttgctggtacgcaacctgaatcgccacgtaggtgcgcaggtaatcacgaatatcatattcagatagggattagtggttagtgattagtgataagctattcactctctgtatcttcaatgttttcaattcttctatggcacgattgtaatatacaggcgtttccaggtctttattgttatgcgcatctaacccgatgatggcagtacaaccttcattggcggcaatgtgccagaagtccgggcagggataagtctgcaaattgtgcgcctcattataagctacataaccgatattatattccagcggaatatggaggcgtgcggctgtgcggcagatatggcgactgattagcttacaatgacggtcgaactgaggatatgagcgcatgaataaatccgggtgagccaggcagcagaacaaaccactctccattccctcgatggcgctttcttcatagagttccagcatatcgaggttctcggtatgatgcccgaagtaagggaacttctcatctgtatggtaatggtgattgccgaacaggatataatccagttgatactctttgattttttctttcagccaatgaatataagcgggaaaatactcgcattccaatccgattttgatactgatctgatcccggtatttctcgcggagcgagcgtaggctttctacgtatctgggtaattcttcggggagcatacgcatgtcagccacataatcggtgtgatacttccacggagtgtggtctgaaaatcccagctcctgatagccgcctttgatggcgctgagcacgtagtcttcgtcgctacccgtagcgtgcatgcaacgggtagtatgagtgtgataatttgttttcattgaattgttataatcgtatccatgcggatgtcgaatggttccgcaggcacttcttccactaattgaaaaggaaaacagatgccggctttgaaagccgtgaggcgggggagcagtcggtcataataacctttgcctctgcccaggcggttacctgcattatcgaaagctacgccgggaacggcaacaaagtcgatagctgcatagtcggtgaagagttctccggtaggttcttcaataccataacttcctgttgccaggtcttcgggaccggtatagacacgcaattccagatcgtcacctacgacaaccggaagcaatatccgcttttcacggctccacttccggacaaattcatgcgtatcgacttcgtccttcagtgaataatagagcaggacgatatgtgccgccctaaaagccgggtgggcttccagggcggcaagtatttcagcagactgggattgatgcgtagtggtaagcccgtgccgggtctttaacaatgccatacgcttccgcagttctttttttctttccttcatctttcgtttcttctttcacaacgtcttccggagctttgggaaatgcttcaccgttctccagaatttccaatgccttttgtacggtaggatcgccctgattgatataccttatataaggctccctgcctaatatattatagataatgtttccataaaggtttctttccatcagcttgtaggacttgtgaataaggatattgcgtctcttcactcccttgctgtctgcaaaacggataaactgttctacgataccttgctgacgaagatatttcagcatgtcttcttcattttcgaactcattcagtttagcccggttgcggtcggaatactggaagctgaactgtaaagtcagtcctttattgagcacttcaatcagataagaagaggttcctgtggtatcctgcggtacgaatacgtccggcataataccaccaccaccgtaaacgggacgtcccagacgggtggagtagcgcaaattctcgtccagcttgatgctatccttagagaagaattcaccatgctcgtagcgggtcagccaatccatttcgtacttggcgtccttaccattcttatacggacgttgtatgcaacgaccggatggagtatagtagcgggcaattgtcaagcggatagcagagccatcgctgaagtcaatcggttgttgtaccaatccttttccgaaggaacggcgtcctacgattgtaccacggtcattatcctgaatagctcctgcaaagatctcactggcggatgccgaactttcattggtcagcacaaccaaaggcatcttctggcagctgcctgttccgttggcataatcttccatacgggggtatttacgtccctgggcatagacaataagttgtccttccggcaggaattcattcaccatacgcacggcagcctccatgtaaccaccggtgttgtcgcgcaagtcaataataattcccttacaattttgatgactgagttgagcaatagcattcagcagttctacatgagtagtacgtccgaacttactgatttgaatatatccataatcattgctgagcatataagctgcatcaattgtattctgtggaatatcaccgcgggtgatgacaaagtccagcaaattcttttctgtagcacgtttgacgcttagtttcactttggttcctttcgggcctttcaaagtgcgcatggctttctcattggtcagttttattccggcgaacaagctatcgtctaccataacgatgcggtcgcctgccatcagtcctactttctcggacggaccgccttgaatgacactgttcacatgaatcgtatcatcctgaatggtgaattgaataccgataccgctgaaactgccttccaactctgaattaacttcctccaggttctgggcaggaatgtaagtagagtgggggtctaactcagccaatatctgtggcattgctttttccacaaggtccgtcatgttgacggtgtctacatactggtcttcaacaacccgcaacaaagcattcagcttgttggacgagccattaataatgcccagcgtatttccggcgaaatgcctggcataaaatgttccgatcagaattcccattaccacgctgattgcaatgacgagcggggtaaagcgggaagagttttttgtactcatatcttttagttgttagctacgagctacaagctacgagcggtagctggtggttcgtagattttagtttattgtttgtttaaggtctttattctttgcttgtagcctgtagctcgtcacttgtagctacatatactaccttgatacctgcacgcttcaaaagttcgataccgtcttccaaacggtatttttcggagtaaaccactcgtttgatacctgcctggataatcagttttgaacattcgatgcatggcgaagcggtgacatacatagttgcaccgtcgctgctattgttagagcgtgctatcttcgtgattgcattcgcctcggcatgcaacacgtaaggtttggtaacgttattatcgtcttcacatacattttcaaaaccggcaggcgttccgttatacccgtcagaaataatcattttatctttgacgatgagtgcacctacctggcggcgtttacaatatgaattttccgcccagatacttgccatacgtatataacgcttgtccagcgcttcttgtttttctttagcagaaccttccatagtcttaattacctgagttacgttgtggagcgaaagagatgaactttacagtctgtccttctttgtaataaatatataaattcttattatctcctccatatttgaatgcactctttagtccatccataaaagccttacctaaatacttatctccatcggtgcctcctccgttttttatggtaatctttaattcccgattatccccatttgcactccagtcaccattgacagaggcactggtggctttcccgctaaaagtcccgattgctacatcgtttacgttagcaccttcaaacactaaagtgtaattatctcctgtaatcgttttaaaacttttttctctggcatcttgatcgttttgccagaagtcgtacattttgttttgtccttccactgcaatgtaagtcatgtaccaggtttttccggtgaagatgtcaatgacatcgtcttcctgatcacaagcgctcaatacgggtaagaagagaacgactaacagtaactgtatataggtcttcatctttttcatttctttattccatttctgattaataatgcatcaatagttggttcttgtccgcgaaagcgtttgtatagtgtcatcggatgttctgttcctcctttggaaagaatgttttcccggaaggaagcggctacttccggattgaagattcctttttgtttaaacagtgagaaagcatctgcatccagaacttctgcccatttataactgtaatatccggcagaataacctccggcaaagatatgcgagaactgtgtactcatacaggcatcttctaccataggaagaatctgtgctttcttccatgcttctttttcataaatcttcacgtcgccatcaaatggggtggtacgggtgtaccatgccatatccagtaatccaaagctaacttgacgcaggcaggcataagcggcatcgaaattagaagaatctacaatgcgctgtaccaattcgtccgggatgagttctccggtctgataatgtctggcaaatgtgtgaaggaactccttttcaatagcgaagttctccatgaattgagaggggagttccacaaagtcccaatatacatttgtaccgctcaggttttcataggtggaatttgcgaacataccatgcagactatgcccaaattcatgcaggaatgtttccagttcaccaaatgtcagtaaggcgggtttgtcttttgtcggcttggtgaagttcatcacgatagatatgtgcggacgactgttttcaccggttgcctcgtcaatccattgttctttataagaagtcatccatgcacctgcacgtttaccctctctgggatggaagtctgtatagagcacggacagaaatttaccgtctttgtcaaatacctcatatgcatccacatccttgtgatataccgggatatcgctgtttttcttgaaagtaatgccatacaagcgggtagccagaccgaataccccttcttttaccttgctcagttcaaaatagggacggagcatttcatcatctatctggaatttctggtctttcagtttatgggaataataagaccagtcccaaggcatcactgtgaagtcactgccttccagttggcgtgccaaagcctctacctctgcatattcttgcttggcggtgggagtgtaagcatccagtagctgatccagcagtttatatacattgccgctgttttctgccattcgctcttgcaggttatattcagcaaaactgctgtatcccaaaagttgcgcaatagccaggcgggtattaacgagcttctttacaatctccagattgttggtttcattgtcatgggtacatttggtattatatgccatataaagcttacaacgtaaatcgcggttactggcatacgtcataaacgggctataactgggggcctgcaaggtgaatacccatccttccacacctttttctttggcagtttctgcggctgcatcaatggcgctttgcggcaggccggcaagttgtgcagggtctgtcagtaccagtttatagtcgttggtttctttcaggttgttttctccgaattgcagggttagcaggctgagttctttgctcagagcacggtattgctctttggcttctccttcgagattagctccgctgcgaacaaagctattgtacaccttctccagcagcttgctttgctcgggagtaagattagcctggtctttctggtcatacactgccttaatacgtgcaaataacttctcattcagagtgatgttattaccatgttcgctcaacaacggcatgatgttttttgccagttcctgcatgtcatcgttggtttccgcgctcagcagattgccgaatacagtgctgacttggttcaatagttcgccggatttctcgtaagcagcgaccgtgttggcgaatgtagccgcttccggattattggtaatagcatcaatctccgcattgtgacggttgataccttcacgaatggcgggttcataatgttcggtctttatcttttcaaacgggatagtaccgtgaggcgtagaatacttttcaaaaaaagggttttgagcctgtattatattcataaagcagagtaatgttagcgttagttttaattttatcatacttacttaggttcggtaaaaataatctaaccgcaaaagtgcaaaaaaaatagctgatttaatgaataacccgttgtattttaacaaaaaacaggcaacctcgtcgagattgcctgttttaaatattattttgtactctgcttattagttgttaactgaagccatgtgagcgatcaagtcaagaaccttgttagagtaaccgatttcgttgtcataccaagatacaacttttacgaaagtatcagtcaaagcgataccagcttttgcatcgaagatagaagtacgagcgtcacccaagaagtcagaagaaactactgcatcttcagtgtaacccagaatacccttcaattcgccttctgaagcttctttcatagcagcacagatttctgcgtaagtagccggttttgccaagttaactgtcaagtcaactacagatacgtccaaagtcggaacacgcatagacataccagtcaatttgccgttcaaagcagggattactttacctacagccttagcagcaccagtagaagacgggatgatgttgccagaagcagcacgaccacctctccagtctttcatagaaggaccgtcaactgtcttctgagtagcagttgtagagtgaactgtagtcatcaaaccatccaagataccgaacttgtcgttcaatactttagcgataggagccaaacagttagtagtacaagaagcgttagatacgaattgagtacctttcacgtatgttttttcgtttacaccgcaaacgaacatcggggtgtcatctttagaaggagcagacattactacatattttgcaccagcttcgatgtgagcttgagctttgtctttgctcaggaacaaaccagtagattcaactacgtattctgcacctacagcatcccatttcaagtcagccgggtttctttctgcagtgatgcggatagcttggccgttaacgatcagcttgctgttttcaacatctgcttcgatagagccgttaaactgaccgtgcatagtgtcatacttcagcatgtaagccaagtaatctaccgggcaaaggtcgttaataccaacgatttgaatatcgtttctttccattgcagcgcggaatacgaaacgtccgatacgtccgaatccattaatacctactttaatcattttgtttaaacttttaagggttttataatatttgttcaaatatctctcttctcttgcgcatttatttctgaaatgcggtgcaaaagtaagaaaatgtttttatattcgcacttaattttataattaaataatggaagtgatgggaaaaagttcatttttacaagattttaaatcatttgccatgaaaggcaatgtgatagacatggctgtcggtgtaatcatcggtggcgcgtttggtaaaattgtatcttctgtggtggcagatattatcatgccgcctctcggtttattggtgggaggtgtgaactttacggacctgaagtgggtgatgaaacctgccgaagttgtggacggtaaagagattgccgctgtaaccttgaattatggaaatttcctgcaagtgacgtttgactttctcattattgctttttctattttcctgttcatcaaattgctgaccaggctgacggctaagaaggaggcggaagttcccgcagcacctcctgctcctcctgcacctagtaaagaagaagtcttactgacggaaatcagggatatcttgaaagaaaaacgataaaaagaacaaaaaataatcctcactgtacccggtccgtgtctggcccgtacctggtccgtatccggtccaaacgcttaggtacggagcaaatacggatctgatacggttcgggtaataggcggtaggaaaaatgggacaattcattccctgtcagcaaggagttaacttcctgtcgacaagaaattaactctttgttgacaggaagttaactccttgtaatatcttgattatcagcaatgtttttaaagctgattttactgtgttctatgtgtctttccggctaccaaattcattaattatgttatgaaatatagattttctggctattattcccgttattttcttacttttttctacttttgcggaacattttaattaaatccatacagattatatgcaagaaaagattgtcattcttgattttggttcgcagactacgcagcttatagcccgtcgtgtccgtgaattgaatacgtattgcgaaattttaccttataataagttcccggagggggatgagagtgtaaagggggttattctttcgggaagcccgttctctgtatacgatgaaagtgcatttaaagctgatctgagtgaaattcgtggaaagtatcctattctgggtatctgctacggtgcgcagtttatcgcttataccaatggcggcaaggtggaacctgccggaagtcgtgagtacggacgtgcacatttgagctcttttgacaaagacaatgtgctgttcaaggacgtgaaggaaaatacacaggtgtggatgagtcacggagatacaattacggttatcccttccaatttcaaaaaaatagcttcaacggataaggtggcgattgctgcttatcagatagagaacgaaaaggtgtggggagtacagttccatccggaagtatttcacagcgaagatggcacgcagatgctgaagaatttcgtggtggatgtttgcggttgcaaacaggactggagtgctgcttcctttattgaaacaacggttgccgaattgaaggaacagttgggtgatgataaggtggttcttggtttgagcggtggtgtggattcttccgtagctgctgtattgctgaatcgcgctatcggtaagaacctgacttgtatcttcgtagatcacggtatgctccgtaagaatgagttcaagaatgtactgcacgattatgaatgtctcggtctgaatgttatcggtgtggatgccagtgccaagttctttgcagaactggcaggtgtaacggaacctgaggaaaagcgtaagattataggcaagggttttatcgaagtatttgatgaggaggcccataagattaaagatgtgaaatggctggcacagggtacgatttatcctgactgtatcgagtccctttccattaccggtacggttattaagagccatcataatgtaggtggtttacctgaaaagatgcacctgaaactttgtgagccgcttcgcttgttgtttaaagatgaagttcgccgtgtaggtcgcggattgggtatgcctgaacatctgattactcgtcatcctttccccggacccggtctggctgtgcgtattttgggtgatattactccggagaaagtggctattctgcaaaatgcggatgatatctttattcagggattgcgtgactggaaagtgaaagaagctgatggtagcgaaacttctctttatcatcaggtttggcaggcgggtgttatcttgcttcccgtgcaatcagttggtgtgatgggagatgaacgtacgtatgaacgtgccattgcgctgcgtgctgtgacttctacggatgctatgacggcagactgggcacatttgccttacgaattcctgggtaaggtttccaatgatattattaataaggtgaaaggggtgaaccgtgtaacctatgatatttcgtcaaaaccgcctgcaacgatagagtgggaataggattattctttttaagagtgtatataaatagcctcaactgtataaagttggggctattttaatctatgtttatgatttaatgttctgaaaagaagttgaataagcatcttttttcttgcagatgttatataagtgttatatatttgtgatacataatataacaaatgtaagatatatggaggcagcgatagatagaaaacaaacagcgtttcggctcagtacggatttgcttgaccgtcttagactggcggcaaaaaaacagaatagaagtctgaataactttgtagagagtatccttatggatgttgtttacaatgagccgaatgaagaaactaaagaggctatagcggaagcgaaggcaggcgagtttgctggtacaattgatatggagaacttcgatacatttatgaagtctataaaaaatattgaatgaaagaacttcgttatagtactaaagccagaaaggacttgaaaaagtacaggaataattctcgaaaaatgcaaaaactatacgaactattgaatttgcttattaaagatatagaaatacccgaaacatttctgccgcataagcttataggacagtataaaggttgtatggaatgtcatattgagggagactttttattaatatggattgatgaagatcgtaattatatagacgtaatcaggttgggaagtcattctgaattgtttgaatagtgatgtccggatcattcttaccgcgtaaatatacggatggagatactccgaactgtttcttgaagcatttactgaaatagaatgggtcttcgatacctatcttgtaagatacctctgccactgtataacgattttcaagtaaaagttcggcagctttcttcatgcggatgatacgcatgtattcattgggggaataaccggttattccacgtaccttgcgataaaaggttgaacgccccagtcccattactgaagcaaggtcatctacggcgaattcactgttactaatctgttcttccagaatagcctgaagcttatcggcaaattgtttgtctttctctgacgtacagatagcaggagttatcattcccggatcatccgagaatttcttccgtaacttttcacgttgctttatcagttggaatgctcttgccagcaatagcttgggactgaatggtttggtgatatatgcatccgctccgctttccacgcctttcaggtgattttccgctgagctcatagccgttaataatataataggtatatgactggtatcgaaatcatttttaagtttgcgggtgacttcgaatcccgtaagccccggcatcaatacgtcgcagatgatgagatcagcatcgtaagtacgtgcgcgttccaagcctgaaagtccgtccgcttcagttaccacctcaaaataaggtttgaactcttctttcaggaactcacgtacatcgttgtcatcctcgatgatcaacagtttgtactgatttgaaggagttttttcctctgcaatatctacgtccggaatgttttcctcttcatagctttcctgccggtatgccttttcttccagaaaggcatcgtgaggaatcaggaagtctttctcttcatatacactggtgtcggtggggagtgaaaccgtgaaaacagatcctcccccctgattctcatcgtaagtaatgctgcctttatgaacatttacaagttcgtgtgtcaggtgcaatcctattccggtgctgttacttgagaagttgctttgcatgaaacgtttgaacagttctccccgtttctctttagcaatgcctattcctgtgtctgctacgaaaatttccagacatttcttatgctcgtccactatggctgaaagtgtgactttaccattgcttggagtatatttgaaagcattggacaataaattataaaccactttgtccagatttcctttgtcgataaacattttataggaagctaccgaaggttggaaacggaaatccatgtttttagaggccgctgtgtccttaaaacttaaaaatatctcatgaaggaagcccatgacatctgtttcttccaaagaaagggccagtttgttgttttgcatttttctgaattccaataactgattaatcaggcgcaacatacgctgtgtacttttattcatgactttcagtgaattggtcatttccttgggaactttgtctatactttgtattttttctaacgccccttgtattaaggtcaggggagtacggaattcatgtgagatattcgtaaagaatacaagcttatattccgtcagttgtttttctacctgcactttattacgcaaaagattgaaatcacgcaccaacttgtaggtgatgtaaagcgcaactataaacaatagggtataaatgaggaatgcccaggatgtttgccaaaagggaggagctattgtaattttcagaacggcctcctgatcgcctgagatgccggtagcattgcagacttttacatgcagactgtacttacccggtggtaggtttttgtaagatgcaaagctgagcggagagggcttgctccattctttatcataattctctaaacgataagtataggtataactgtttattttcgaataatcgaatgtcgtgaaatctattacgaatgatctttgaaaatacttcaattctatttcatctgtgtacatcatggcgctgcttaacggtgaatcagtatctcccgggcgcatggatattccgttgacttgcagattagtgaaagtaaccaccggattgagagcaaaattaattcctgtttgtccggggttgattaccagcaatccgtagttggtaccaaatagtaaactgccatctttactgacgcatgaactattgtcactatatacatctcccagtgtataagccgaggagaagaagttttcgaaagcccgcgtttcaggagtgaagcgtgaaataccatattcggttgcgatccacagttttccttgcctgtcttctgcaatagcctgaaccatgttgtttaccaatccattgttggtatcataatgtttgaattccaaatttttatagccattatccggggtacacatgcttaagccgccgcctgatgtaccgatccatatccggcctttagtgtcctgatagatacattttatctcattgctgagtagtttcccattattgtaattgtaggtcaggtagttcgtggaattggctatcagagagtccggatgaaacacagatactccgtcgctgtttcctatccacatccatccgtttttatcttccatgatggcgcgtgttcgtcgctgtccgaaacttttgttcagaaaatgccggaaggtatatccgttttcacctttgacggctaaatccagtccgcctccgaaagttcctatccacattctccctttccggtcgcagtataagatgaagatattattattgctgatggatgaagcattcccggattggttggtataccatttatcaccaatgcgaagcccttcgccacgacttcccatccatacggttccttcattatcttcggctatcgcatatatattggagttgaaatgaagtttctttttctgtgtcttcatttgcggatcatagacaataactcctccgccccgggtaccaatgcaaatatcatcattttttaaccgggtaatcatacgtacggtgtttgaacggtctgacaaagagactgcctccggaaaaatgcgctttattccttcatttaaaatcgtcaggcgcgctattccggcatattcggaactaacccagatagcacctgaactatcttccatcagatattgcagataattggaactgatatggctgaagccgtcaatctgaaagtcgaaatgttggagttcttctgtaagggtatcgtaggcaaacagtccgttgccataggtggatatccagatgatgcctcgggaatcgtgtactacgtgatagcgttccatatccacgtagtttaatttgtcgggagtggagagttgaagagtcttgagggcgcgggtcttcgagttgacataccacaccttaccggtattgttatagatccagaagttaccgagattgtccgtcaggacatttccgtttttaatgtccaattctgcctgacggtggattcggtttgtttttgtattgaacaggtatcctccgttcgaagtgaatataacccagtcatcttgcagacaaagcgtgccgtatatggtcagggcacttttctctttttgtaaatggccaactgttacgcttggcttgttttcttcttttttagagatgataccgtttgttgacaggaaaaagatatcctttccgaaagattgtgcggcaaaagtattgcgcttttcaaccagtatagtcttatcaccggttacctgcactacgccacaatcggtacctatccagatatttccctgctcatccgggtatacataagcgacactgtctgagggaagattacctaaagattttctaaaactgacggaagaaaatgcttcgttttgataagtcacccgtcggcagccgttccggctgttccatagccatacgtcaccattggcggcttctgccttgcggtcgtagttttgtctgtattcgccacagccggtgaaatctacgaaacaatcttttcttagatcgtagcaattgaagaattctccggaagtttctatccacaggaaaccattcttatcctcgctgatggttctggcgtgattggtcgacagggagatccggttgttaccggattcgctttccgggaggaaagtgacaaatgaattgccatcgtagcggctgagaccattcagggttcccatccagataaatcctttgctatcctggaatatgtaacagatggaattgttggccagtccgtctgtggttgtcatgtgcgtagagcgcacttcgatggatgcagaaatactaaggaggctaactagcaaagatatacacgtaagcaggatatgctttttcatacttcatagattttagtgcgaaacaaaaatacggaaaaagtgcattgtaacagactatcaatgcacttttgttttttaatccatgtggaacacttcaggcagggggatggttaccggagaattgtcgggattcaccttcatgatatctgccatataatcccaccatttttgtacaatagggttggcacccatatcttgcgaggattcttcgcctttcgttttctggcaggcaaagaggatgttggtttctttgtcccagtagatggagtaatcatacactccaccgtcggacaacatctttttcaattccggccagatggccgcatgtcttctttcatattccttttcgtagccggatttcaggaacattttgaatgcttctcttttcatggtaactttggtttatagtgagctaattggaatcggtcacactgaaaatcggttcttgtgttttctgttcggtgcggtagaactgaatggcgctgtcattcatcttcggatgttgtttatttagcaaattgatcatttcggcacctgcccagatcacaggaccatagccgtgcgcggcatacacattgaccggacgataataatagaaagccggatcgaatgccatgccggtgcctacacaagttccttccacctgtccttctgcattgatctgtgtggagacggcttgccaacccaattgagcaaccgggccgtaggccattgcatccagccatccttggttgatggcatgggcgatgcaatatacatagatggctgttgctgaagtttccagataagagtcattccgatccaataactgatgccagagcccttctccactttggcaggcagctaaaccacgaacatgttcgcaaaacagctccatgagttttgcacgctgaggataattttccggcattacgtccagtacttcggtcatggtgagcaaagcccagccattggcacgtccccaatggaaagccgggtgatcttgcataccttctacccaaccgtggcggaatagtttcttttccggtacccacatccgttctgcaaactggaatatctgcctggtagcttctgcaaggtaattgggcttattatctttggccaatttagaataccaggcaacaggcggaatccccataaacatatcgtccagccacaatgtattgtattggggacggatacgggcgaaagttccgtcggcaaggcggtattccttgttcaagataaagtcgaggtaattgtctatcaaaggatagagattaagagattgatcttgtaattgggctttgatcatggctgcacatacggctccggcatcatcgagggcatggggagtcagaatttgcttcatttgcggatcaacctggccacttttctcttgtaattcccggaaatgcggcgctacttctgcaaggaaattaaatcggtcagtgacgtatttcatgtagttggcgtctcccgtagctttggcggcggccatcatggcagagtacgtaactccccattcataactggcaaggcggaaagcgcccctttccagctgtgcatcagccggtaggttcttgtaatctgtgattacctttccggtcttttcactaacaacgcgggtaggagtgttcttttccagatagcggagtatgcggtcgatgtctgtctttatttctgtagtcgtaagttctttataagggactttgtaggccggttgtaatagatgcaacggagtgttggagtcatttattacttctttctttttttgggcgtagatactgataccggttaacaacaaggcacctgttaggcaaagagtcttaatattcataacttatagttctttatcttttgggttattacttaaaattatatcctctgaaccaccctttcaggtccggaccgaaatagaaaccgggttgggtaggctggttgtaagctacgttctgtgtggcaatgctgatacgatacaccggatcttccaggaaagtatggaagcggtaatcagtgactatcggagagacataaagacggagagcggtgttgtcttccgtgcggaggagaacttcctcacgccagtcaccgataatgtcgccttgcagacagggagttgctttggtgccgctgtttgatgcggctccggtgaaagtagccagtggtttgcaaacgccggctttccagtcgtatttggaaactacattcttatccagcaattcacgaagcagatctccatcccaccatacagccatgttggtagaaaagctttctatatccggattgattacttctcctttaatattacgtagtcctttcgattcccacgaccacatttccacacccggattcgtcgggtcgatatcagctgccatacaacgtcctacatctgtaccactttttatctggaacaaaaccttgcccgttgccgcatcacggaaacttgagccgtctcttttattttcgtggcaatcccatacctggagtcctttcattgtaggggagaatttcgtcagatgtatggcatccccgtgtcccattccggtggaataaagccctttaccattattatcaatagcgcaggaaccgtagatgatttcatcacatccgtctccatctacatcgcctacacgaagattgtgattgccttgacctgcataagcttcatttccgggagtgttactatcgaatacccaacgttgctttagttcttttccgttccaatcgaaagcggcaagtactgcacgtgtataatatccgcggcacatgactgcactgggatgaacgccatccagataagccacggctgccaggaaacggtcgctacgattggcacggttatctccccaatcttccagttgtccgcgttcgggaatatagtcgattgtcttcatggctgctcctgtaagtccattgaagacggtgaggtattcattgcctgtcaggatacgtccctgattgcgcaaaggatctccctgacgtggtttaccgcggggatcttctttagcgaagtcgccgccggtgggttgtgtagggtctcctggttcacgataatcggcagaggcatctccgatgatctttccctggccatcaatagtgccgtcggaagttttcatgatgatttcggcacgttcgtccccatcgaagtcataaaccatgaactgggtgtagtgtgcacctgcacggatattgcgtcccatattaatgcgccagagtctttcaccggttagacggtagcaatcaaagaatacattgcctgtatacccgtcgtgggcattgtcatgagcatttgaagggtcccatttgagaatgatctcatattctccgttaccatctacatctccgatggaagcatcattgggaatatacgtatatttttgtcccgcaggagttatgccatctgtcggaggctcaagaggaatattgatatagcctgtcggtgcgttggcaggcaaggtgtagctaccttcgatgtgtccggtttctgcaccatttacaactggttttatggtataagtagctgctttcttacttttatatgtatcccgataaaaggttcctgttgtggcaggtacttcagctactttctttccgtcacgatagaggttgaaagaagtgtttactggatcggaagagagatatcgccaggaaacagctacttctgactggttttcgcggatagctaccacacctcttcccagcttttccttttgcagcttcgaatagtcataagccggagcattagccgctattttgtatcttggtgcagtcagggcaccggatactccgatggagatcactgtaattgctgcaatacttgtcaagaattttaaagaaagttttttcataatacttgtagttttcattagttgcaaaattacgacttcatacgggatctttccatggactaatatgcaatatttatggaatatcgtacaattatcggctcatcttagaatttattgccatagattttccttaaactcaatctcaacgatacgtagctcgtggttagctttatccccattcttggctttgaatagatccagttcattggcgacaggagcagctacttctacaatttgtccgaaagcatctccttctttgctggctcccttcagacggacggtaatctcgtcggttaatacgggcttcactttcagatggacatatcccagactttttgcagtttctccattccagatcagttcgtcacctgcataaatttccagcgggtagctgcgcatacgccacccggtcagtttcagacacacttcatctacccgtgcagcacgctccagatgataagtaatccaggcagtgtttactttaccgtcatttttccattcgctcagttcattatcatcaaagctatggacggcatcttcattattggcacctgccacggcggataaaacggcaatatctaccttggtatctttgtaagaaggtgtgagtggagtttctccgcgggttaaccagccttccagttcatttccggggatatatttgcttagcccgtctttcatttctaccggtaaggatgaaagactgatttcagctggtttcaagccatctgctttcgctgttatgcggacttttcctgcggtagtcagagagcggagcagggcacggttgatgccacattctacgggcaaatcttttgaaagaatatagttgtcttttccttgtgcgatgcctccacaccattcggcagggccttccacttcaaaatgtatcagatcattggctaacgggcaacgtcttccatgcttatccataacttctacctgaagtaacaccatgtctgcaccgtccgctttccatccgtcagggctctgaacacaagtcagtctgatttcttccggctttcctgccgtttgtagttccgtacggcaacattctttgcctgtttcatcatagcctatggcttccagctttcctgtttcgaactgtacatctttgaaagtatacaggaaatgatattcccgttcaccttctcccaaagattttccgttcaggaaaagttctactttgtcagcaccggaaaccacatataccggttttattacatcttctttgtagttccagtgtccgatgatgtgaatgcgcggctgctctatatctacccaaccgtcccacatcacctgatgggtataaaatgcatcctttggaatacgcatggcatctgtcactccgctgcgacgatagttttcttcaccccggaagtgggtatttgtatccgagaagataattttcactccacctgaactgatacgtgtacctgtccccggacgttcctgccaatagtcgaaccagcggcgtatattttcaacagccagtatatcctgattatggttgtagtcgcttgcatcctttccacggtacagtggtccggcaccttctttatggtaaggatagctgtattcatcccaatacttgcgcagtccttcgtcacggctgtattccatagcccacatggggtggcgggcacttttgttgatgtaaagcatttcaccgccatattcagcttcccgtatatccagcatctcgcgcgatccgatggctcgtccaccgtgcggatcatattcgtcacgtatggctttcatttccaacatatgctcacggctgatggattcatttcccgattcatagaaaaggatgctcggattgttacgattgtatatgatagcatcgcgcatcagttctttccgttgctcccattgcctgccgacacagtccttttcagcgtcacctgccggcatagcttgaatcagtcctacacggtcgcacgattcaacgtcctgtttccagggggtgacgtgcatccagcgaaccagattggcattacatgctgtcattaatccattgctgtaatcgcttaaccaggccggtatgctcatacctactcccggccattcgttgctggttcgttgtgcgaaacctttcatttgcagtacacggtcgttcagccagattttaccatcaccgaagcgtgtcttgcgaaatcctgtgcgggtggatacttcatctactttcttattatctacccacagactggtctttattgtataaagatatccgtaaccccaactccagaagtgcaggttttccacttctgccgccgctttcagtgtagcggtttctccgggtttcaccaataccggttcacaggaaaaagccttcactgtatttttgtcccggtctatcacttccacttggtaggagacaagcttattcttccggtgttcattctttatttgagattccgcatgaatggttgccttgcgcgacttcacatggatatcgtcagcatatacatatacgcctgttgttttcagattgctatataaggggagggtttgatagagtttatccgtgacgtgcaaccatacatttttaggtatcccaccataattggcattgaagttccggttgttccactgatacttggtatccgtattccgttctttgtaatcccagttattgtcaatgcggatggcgattacattttcctgtccatattttatatgaggtgtcaggtcgaaaccgacggccataactccgttctcgtggaagccgatgtatttgccattgatatagaaatcagcaccctgacgtacaccttcaaattcgataaagacttttttctggtgattgtttgcggggaggcgaaaatgtttccgataccatacgatggtatctgtcagttgttcaatgctcagtcggaaagcttcgttttcattgaaagcataaggtaatgtcacttctttccaatccgcatccgcataatttattttttctgctccggatttatctcctacggatagtaaccaacctgaattgaaattatatttatcccgtgattcggaagctgccgcatgtaaacttgtccatagaaaggtcagcaaaaatatggaaaataggtgtttcatagttttatctctttttgattagaatacaaaagtacggtaaaatatattattcctcactatgcataataaaacaaaacgagttctgggtatttactcccaaaactcgtttgtctgttctgtagaatcaattaataaccgggattctgcagggcgtccttttcctctttgctcagagcactgccggatgcattggtaataccatccaggaatgattgtggaatggggcgataatagtgtttagatgaattaaactcaccgatacctctggatacaccatcattaaatttgtgccagcgtgtgtctaatgttttggtacgtgccaggtcttcccagcggagcaactcaccgcaaagttcacgagtacgttcattcaataagaaacacatcatcttgtctgcattactgctacaacctaattctgtatagataggtgcatctgcagaagagttataaacatcttctacactgcttagtatcattgcattcttggtggaagccgttgtttcctgtccttccatattattggattcatagtaagtattggcatcagaatagattgcaccgtcagcggaataacctccacctttgccggagcaataagaattgttcttgtatgactgaccgccatctacatttttgctacgatcttcgccggccgcatagcctgcacgttcacgaagtttgttgatccattcgattgcattgctataattagactcacccttacggatataggcttctgcaatcatcagaacgtcatcggccgaacgggcgataatggcgtcgcgtgtaccgaactgcgaagcgatcgagttacgatatccatcgcggaatttggacaaagctacagaacgtttgtgaggaatgataccataatagttacctgtataagaggatacattccagctatgagcttggcttttgaaatagcgaacataagtatgggtattacaaataacaccgtttttcagcacattctgagtcggatcattcacatacgattcataacgggtatctcccggattattcacgatatatttgagaccaagctcaccagcaacaaaacgtttatcgccttctttcgctcctgcgggagcatatccgctggcaatgtcttctttagtccaggtgggtgcaccgtttgtatcgttcgctccgtaacaggtgatgaatgatttccagaagcgagagtcgtttacgcggtcaaacacctgcatggtatattcggttgcactgacatacgagaattcacgtcctcctgagatatcacgtttggttcccgccatatcttgatatacggaaggatagtaaagatgcatttgattaccgtagcgtccccatgtggcttcgtcattggagaattgagcggctaaaataacttcacttactttttcattcgctccattgggctcattataatcccacagttctacatagttagtgcacaggggatgtgctgcaactacttcctgtccgtatttgatgacagcatcaaggtcagttgatacataactgctgttccagccgctatacaattctgaagcacggaataaatgggcttttgccaggaaatgtgcggcggcatatttcgtgatgcgccctgtcgcttcccctttttgaggcaataatctatacgcctcttccaggtctgctataatttgagcgtagatttcttcttcactgttgcgtgtaaagtaagtctctgcactggttgaaggagtcagtttcaaggggactcctccgaattgctttaccaattcaaaatatgcataggctcttaagaaataaccttctcccaaacgggtattgtacgttgcactactctgattatagtattgcggcatattgctgataatgatatttgccggttctactaatccataataattatcccacatcggctggttggctccgttctcagaagaatttaagtcctggctatagtgattccatgccggcatggtgttgttggcatctgtaaattcgtctacacccatgttatggcattcgatagcccagatgtagttgaatttgaatttcagtttctgataagcacctgtcaccaattcgtccagaccttcctgcgtcttgaaacggtctgtgctgtattgggtctttaaatcttcatccaaaaaagattcgctgcatgaagtcattgaaccgcctatcacactggctaatgcggctgcaaataatattttgtttaatttcataatgttctttcttttttaatggtttgttagaatccgatgttaacaccaattacaaaactcttgattgtggtaggcgaaccgaatgtcttcttattgttgtcatagttcattaaatctgtatccagccagtcgcaagccttgtaaatggagaatggattcatggcctgtacatataccttcaaattgctgagtcctgtgttcttcagctgtttcgttgtgaagttatagcctaatgaaatattacggactttgatgtaagatccatcctgatagcccatagaagaactgtaggtatcggcggcttcaccgtttgatcccggagaataatattctgcgttttcgttggtgcctgctacccagtaatcaattttacgttgcatgtagcgtccatccaaggtgagtgaaccttggggtacatcaaatccccaacgtgaaagaatgaagacagacagctcgaagttcttgtaattgaatgtgttagtccagcctgctgtccagcgaggacgtacgtgacctacaatctgacggtcgttggttgcatcaatcttatcatcattattaaggtctttcactttgatctgaccgggtttgcggccatatacggctgcttcttccgcttccgaagttttccagataccatcatacacataatcataatatacaccgatttcttctccgacgaaccagttgttgtttacgtcttcagttctgccgttggacagttcatcaatcttgtttctatccattgaccaggttacggtactgttccaggtaaaatctttagtctcaacgggaacggcatttacctgtaagtcgataccccaaccggaagtcttaccgacgttggcataagtagaagtataacctgtcagtgaaggtatggacatggccagcaacaaatcattggttttagtcttgtaagcatcaatactaccgcttagtctgttattaaagaagccgtagtcaatacccaggttgtactgcgttgttctttcccatcccagttcggagttggccatcttggcgggatcttttgcagaaggatctgaaggaacataacccagagaggagtctgtctgtccccagttgtaatacaaaccggtgatggcacctttggtagcataagcatcaattgcagcatttccggttacaccgacaccgaaacggagttttaattgactgagccagttaatgtctttcatgaagtcttcctgatcaatacgccatgccaaagctgcagaggggaaactggcccatttgtgtcccggagccaactgtgaggcaccatcccaacgcatggaagctgtcaacagatatttatctttgaaaccatagttcacgcggaccatataagatgccatttgagtttcagtcagtcctgtaccaaaggaactcagagtgccggcagtacctaaattgtaccataactcatcggcagaagcaacgttagtggctctcatatcgcccatttcgtagtgatatgctgaagctgactgcattaatgtcagacctaaattatggtgttcggcaaatctcttattataataaatcaggttgtccaatgtccatgaacgcttctgttcgtttttgtactgtgcgccgttgttaccatcaccattgatacctccggcggcatttgcaattcctaacgtatagtattggaattcaggaccgaactggagtctgtacgaaagaccttccagcggttcccatattttcccgaaatcaacctgggcatacatactggcgttggcacggaaagtacggcgttggttggtgttgtagtccaattcccgaatcggattgatgatatttacatcaccattaggattacgaatgtagtcaccgtttgaatcataaggcacagtccaggggagcatacttcttaaagcattgtaaaggtcgcccgaaccggttactgatttggagaaattgtaaccgtaatcctgatccgaataagaagcattgattgaagttcccattttgaagaaatctatcggattaatgtcaaatgaggtcttcagggtatagcgttcgtaagcctgtcccggttgtgtacctttctggtttaaataaccgaatgaggcatatccctggaatttttctgaaccgcctgatgcacttaaagtatgctcgtgggtgataccggtttgctttccgttggctgcccagtcataggaaccgacttttgaagcatcataagttccgtttgaccatgcttgctcaatatttgcccatgaagcggcgacgctgccgaaaatagctttatcagctgcataatcgggagttgcagaagcataagaacccatgttatacttggcagtacgtgcatagtccaaccattctgccgcactcatcatttcggttacatcatgcaatgtctcaaaagtgactgtaccggaatagttcagcgtcacttttccttgtttacctttcttggtagtcacgaggattacgccatttgcaccacgggaaccataaatggcagttgcagaagcatctttcagaatgtcgatagcttcaatatccgaaggattgatgttttcgatgccgccggtttggataatcataccgtcaacaacatacaaaggaccttgctccgcatcgatagaacgtacaccgcggatattgataccaccgacttcacccgggcgttggctggatgtgatgtccacaccggcagtttttccctgcattccttccagcgcattcttgacaggcatcgcttttagttctttttcgcctacgcgagccatagcaccggttacgtcactcttcttctgaacgccgtaacctactactacaacttcatccagcatggcattatcttcctgtaatgtcacttgtaaattcgttttcccggcaacggaaatctcctgatcttgatagcctatgaaagaaattgagatagtacctttatccggtacgttggaaagagtaaacctgccgtccagatcagtgataattccgttagtagtacctttcactacaacattagcaccgatgatcggttctccggtttggtcaaccacagtgcccgaaactgttttgctttgcgcataagcccctatagccaatactgaaaacaaagcgatgaggaacagccgctggagtttacccgtgcgaccaaacaagcttaaattcttgctgtttttcatactttaattattaagttaaacaaaagttagttttctattctctcaggagattctcaggtctccttgctgtgaaaaagtgttgcaaatatacatgtatggggtagaaaagggaatgtaggattgtgtcaaagcatggaaaattccgtctttctgactcgaaaattgtgtcaatactcatggctaaaatcaaaatgaatagtcccaatggcattttaattattccaggctttcatattagtaatgttagtgataggcaggtgaatatataggtctatagactgcaatacttaataaatctaaatgttttaacctttatgcacacttctctattattaattgcttcctttaggcaaataattgtctttttaaggcatcctttttttaaatcttaatattttatggacattcgaaaggtatatttacttatcctgttatgcacattctgtatcttgtctccggtgtatacacagcagtctctttctgatgaattcaggaaagcggcaggagattatgcagcgctttataccagtaaagtggaagtgggctatagtccatatctctatataaaccatccttattgggatacggatgagtttaagaaaggagcggtttgctatggcgggttagtgcataccgacctgcaacttcgatatgatacttttaagaagcaattgatcgtaattactcccgaaaaacgaatactcctccaggttgacatgaggaaagtagactatttcattattggagataaaaagtttgtgccgcataacgatacttttgctgcaatcctatatgatagtccgcaaatgcgattgactcagtatgttcagtgcaaaatggggacgcctgttgagaaaggacggatcagctatagacagttcgaaaagcctgcacgttttgttttgtctaaagatggggtggatcataccgtgacttcccgttccagttttctgaagctctttccggcttataagaaacaattgaagaagtatgcaaaggaagagcaattgagttttaatacgctctttcgtgcagagtcgttgactgagctaacaagacatgcagattctctaattaataagaaatagttatgacaatatataaaataaggtatatagcagccattctgtttattatatcccctttcgtggcatttgcacagcagcaggcaggagatagtatttctatttttgaactgatagatgccgttgagaaaaacacttcgtgccgcatctatacgacgattgcagagccgtttaaagtgaaaaaggctgagaccttaaaacctactgccgagagtctgcgacaagcattgactgcaacacgttataaagttactgtctatggcaaccggatcttcgttctgcccgaagcttttttatctaccacgcttaccccgatcttgaaaggagaacagatgaaggaagaagaacaagcctcttcttttattcctgtcgtaaaatcttcttcggagaataaggtttatgagatagggaacagatataagccttcttcggaagagatggtggtgctgaccggaaaagtaacggatttcaagtccggacagaatctggaaggaattaacatcgtccaccgggaaccgtgggttgccacagctaccgaccgtcaggggaattttaccattaagcttcccgtcggatataataccattgaaatcaatggactgaatataaaggaaacacgccggcagttcatggtgtatggagagggagctacccacatagaactggaagaagaaaaccatttgctggatgaggttctcatcgtttccggacgtgtgcagaatgtaaggagcactcagttgggaatggagaagttccagcccagtttactgaagaacattcctacagctatgggggaggtggatttactgaagatgcttcaaactcttccgggtatcaaaactgtgggggaggcatccagtggctataacgtgcgcggaagtgctgccgaccagaatctgttgttgctgaataatggaactatttataatccgaaccacttattcggttttttcaccgcctttaattcggacatgataaaggatgcggaactttataaaagcagtattcccagtcagtatggagggcgtattgcatccgtgctgaatataacaagtaaagaggcgagtaaggagaagtttacgggttcggcgggcatcggacttgtcaccagtaaactgaatcttgaaataccgatcattaaagagaagacttcacttcttttgagcggacgtaccacatactcagactggatcatgaagatgctgcccgaaaagagtggctaccgtgatggtaaagccggattttacgatttgggaggcgtattctcgcatacattgaatgagcgtaataaactaaatatatacggctattacagccatgaccgtttcgcttttaacgataaccagaagtacgcttacaacaatatgaacttctctgcaaactggagaagcatattctctgagaagctgacggcaaatttctctttcggttatgatcattatgattaccggaatgatgaatcggtagaagaggcggcagctgcccgcttgtcattcgctattaaccaatggtttggaaaggttgattttagttacaagctggataataaccataccttgaactttgggctcatgagccagttctataatatcaactcaggaacttatgaaccactgcatgaaagttcgctggtgaaatgggatcagcttcaaaaggataaagcgctggaaagtgccatttacattggagaccaatgggagataacccctaaactatccgtaaatgcgggtatacgctattccatgttcaaccttttgggcccgcgcacgtactatacttatcaggatggtatgcttccttcttccaccaccgttgttgactctgtatcagtgggtggcggaaaagtggttaagacctatcaggggccggagttcagattgtctgcccgctatgctttcaatgatgacttctccgtaaaggcaggcttcaacaccatgcggcagtatattcataaagtatcgaatactaccattatgtcgcctacggatacctggaagctgagtgatacgaatattaaaccccagaatggctggcagctggcagcaggggcatattataatacacccggccaggtactggagttgtcggtggaagggtactataagaaactgaacgattatctggattatcgcagttcggccaagctgatcatgaatcatcatctggaaacggacgtgattaatacggaaggatatgcctatggcgttgaattccaggtaaagaagccgtccggcaagttgaacggatgggccagttatacgtattcgcgtactttcctgcgccagaatgacccgcgcatagcccgcccggtcaatggtggagactggtatccgacggagtatgacaaaccgcatgacttcaagttggtgggaaactataagtttacccgtcgttacagtgtgtctttcaatatggattatagtacgggtcgccctactaccattcctgccggacaatattacgaccagggattgcaatccatgcaggtgtactacacggaccgtaacagttaccgggttcccgattacttccgtcttgatcttgctttcaatatagagccgagccatcatctgactctgctgacgcatagttctatttccttcggtgtctataacctgaccggaaggaagaatgtttattccatttattatgtatctgagaatggtagtgtgcagggatataggatgtccattttcggcgctcctattccttttattacttataacataaaattctaaagggatatgaagaaaagaacgaatataataatcctgataagtttgctcggttttactttgagcaactgtatagatgagttcgatgctaagattccggacggcggtgtaggcttgctggtggttgagggtaatatcatatcagacagtactgtcgtgttttcattgagccgtactttttccttaaatgaagatgacttgccttcgggatataataagattacagccgatgtcagtgttgtgggagaagacggttcgcgcatagcgggaacttccattggtgacgggcggtatcaggtacggataggaacgctgaataagcaagtgcgttacggactggaaattgtatatgaaggggatacgtataattctgaactacagtatccgatagaaacggctgcaatcgaagaggtcacttttgagcagccggaagattacggggatatacacattcgcctctctacgcgcaatgcaggggccacaggaccggcatattatatctggacttatgaggaagactgggaagtaagggcggcattttattctaaatggatatatgatcctgtgacagatgaagtgaatatttatgaaaaagcaccttatgcgcaaggatggattcatgcggagtccactaaaacgcttgttggctctacggaatcgaatgccgaaaatctattgaagaataaaaaaatgtattcttttgcctccgacaatctccgtgcttcgtattattacagtacgttgatgaagcagagagccttgtcaaaaggagagttcgagtattatgagaacaaggtgaaattgagcgaagagatgggcggtttgtttactccccaaccctcggaactgcctactaatatcacttgcagcaattcggataaacaagccattggttatgtgggagtcaatatgaatgtaagcgagtaccgtctttatatttctaccaatgacatacaatatgataatccgtatgagtgtagtcttttaccggatggagaaacggaaaacaaaagtaattatgatttatatatagcgggatatcgcattgccttttctgaaatgacggggtatcagtgggctaaaaaggaatgtactgatgtgcgtagtttgggggcgactctcaataaaccttctttctggccgttaccggacaggggatattaatatcggagtattatgaaaagaattatatcgatcattattggtttgatttcggtgctgggcttgcaggcgcaggtcactgaatgtatgcgaatatatacggataaggataattatctggcaggagaagatttgtggataaaagtctgtgtgatggattcggcagaagctccgttcagtaaagtggcttatgtggagatcagcgatatgcgccaggtgtatgcacaaggcaagattgccttgaagaatggaaccggatgggggcgtatcaaattcccgcaaactatgcattcgggtgcctatcagcttacggcttatacccgttacatgagaaatcagtcagcagaccgcttcccgaagaaatatattgctgttctgaacgccagtcaggccacggacggagatgatgtggaattattaaaagattcggtttctttgacttcgggtaatccggtactttcgtcgttacgtttgtcaaccgataaagccgtgtatggaaatcgcagtaaggtgactttgaagttaccggaactgccgggtgatctgaaggatttttctttgtctgtggtgagaagggattgtgcgttacaggcttttccgcctgccgttgaagtgcaaaaaaacaataaggctgccggagaacgctttattgccgagtgcgaaggacatattgtgaccggaagattaataggagcatcggccgattcggtgaatgcccggctatcgtgtgttggaaaggatatccgtatctttgacgggcaactacagtccgatggcacttacgccttctatacctcggaaatcatgaatacccaagatatagtgttgacggctttgccgggaaaaggacgtacgggccggttggaagtaatatctccttttgcagaagtgctgcccgcgaaacttcccaagcttcgattggcatatgatgaggaagcattgatagaacgtagtatcggagcgcaattacaccacatcttaccggtagattccactcacggacaggctgtgttggaacagttgcacgatttcacgccttcactcagttataatctggatgaatatgttcgtttcaatacggtccgtgaagcttttgtagaatttgtaatgggagtacgcgtaagcaaggcggatggcgcaacgattatcagaatattgcaggatgatgtaaagcggttcagtagcttaaaagcgttggtactgatagacggagttcctattgaagatcatgatgcggtattggactataatgcgcgtttattgcattatattcatcagtatagcggcagatatacgtttggcggtaaactgtacgatggaatcatttcgatgataacacatcgtggaacccttcccggactacgcctggatgagaattcccaattgtttgcttatgaattcccgcagaaccgtcctgattttacagctccggtatatgactcggaagagcaactgcattcacgtattcccgatttccgccacacgctttattggaatccggatattacggctgcaacgaatactgtcagtttctacacatcggatatgaaaggaacttatgtggcaaccctgcaagggattaacagcaaaggagagtgtgtacaagtacaaggtgagtttgtagtacgatagtatattcctttcaggctcttctcttagtatcctcatgcaaaagatggcatctttaacatcaaaagatgccatcttttgtagcataacatggcacctttcgcagcaaaagatgccatcttttgcataagaggattatgagatgaacctgaaaggtcttattcttccacctgaaagggttatatcttccggttccaatagcctgtattgttcatactaggagttaaagcaaacaccagtacgcctgctgtcggaatctctgtagttccgatcaaagctttggctccttcagggagggtaaagctatagggtttgtcgctataattaaggactatccccaaaccgttgcggtattccattgtcacaccatagggcagatccattacagggatgttcagtttcgcatagagttttttaagaacatctctttccaaggttccgtccgtgctgtcgattcctatgtacgtgatagtacctttgccaagtttacgggtagtaatggccggttttccttcataaaattcttcgatatactttccccagatctggcaatccttgcttggttttagtatttctccccaagtgttccaggtgtattctttgccatccatcacaaactttcccggttcttcggggagcaacaggtcataaaattccatttcatttcccgtcaggtcgtagataagcgagccgaaaggagcttccggtaaacgcccgtaacggtctttctgtgccgtgcgacaggttaataccagattacctccatttcttacgtattcattccagcggtctgccaatgtcttgtccgccatctgataggcaggagcgatgactaccggatactgtgacaggtctttgctttcattgatgatatcgaccggagcaccgaaactcttcaaggtgcggtaatacttgtcgatgtgtgccattgtattccaggtgcggttttgtttttgccttttgatgctccatgcgttttcatggttgaaaagaatggcggtgcgacgggcttgataatcggcaggtttcacatcacgtgcctttgcctgcgtgcgcagttgcttcacttccttaatgaattgctcgaattcacgtcctccgggagtgatggttgttccgtccgtattcacaattccgtaatgatattgctctgttccgtaaagcggttggcgataacggtatgtacaaataaaatcacttccgcccgcaaatacgctccaaagccatagccggacagcaccgggcagcggttgcggattgatacttccccaatttacttgtcccggttgtaactccatcacaccgtaagttccctgtacgggacggaaaaaatcgttggcgaaagcgatgcgtagagggtttcctacccggtatccgcgacgcccgataccttcgttgtcaccgtaaaccatatagcgggtgtagctcacaaagtccagatcgggacttccaccgatgtgtccttcatcgtagttgggaatataattggtggttacccattggttgcgggcatacttcttaatcagcagacattgctcgttcaggaaatcattggtctgccgggctgcaaagcgccggtaatccaatatctggtgatgattcataaacatctgtgcggtcttgggaagagtgatttcatcgaaagcggagtagacttcactccagaaagcagtgccccaggcatcattcaattctttgatattattatgatatttattccttaggaaatcacggaacgctacttccgcggcctggttataatcgaattgtacggcaggctcattgtcgagttgccagcccacaatacggggatcgttgccataatgttgcgccagtttttctatcatcttgtaggaaagctcccgatagcggggagaagcgaacgaggcatgctgacgtgcaccgtggtcgaggagtgttccgtcttcgtatttaatcaagatttcaggatatttgcggcttaaccagacgggtggggtggcggtggaggtacacatcactacttttagtttgtatttatctgccagagcgactgctttgtccaaccaggcaaaatcaaatttaccttcttccggttccaattgtgctcaggcgaattcggcgaagtgggtgaactcaaaacctaagtcgtgcatttgcttgaagtcgcgttcccactggctttcgtcccaatgttcgggatagtagtagacgccggtcagggtgaggtctttgtcattgaaccaagtggactgtgcaaagagcattccgctcatcaggcatgcacagagtagggtgaagatctgctttttcatggatgtttttcttgatggatttattatgtatacaaaggtaagctacccatgaaaaagagcctatggaaaatagtgcaattccctgcaatataggactcttttagatgaatttccatgcaaatgtacgtgtttccattcattgagacagtgaaatgggctattttcgcaacatgaattaatgaacggaataatggatacataataaccacatcatgaaaaagaagctaataggagttttccttctaatgagtctcgtttgcggaagcatcagtgcgcaaggattgcctgacaggaaagagacgctcgaaaccttaataaaagtgaataattacttcatgaagaagtacgcggactatcgtactccgtcctataatggtattattcgtcccagcaatatctggacaaggggagtgtactatgaaggactgatggcgttgcattccgtttttcctcgggaagagtattatgattacgcttatcagtgggccgattatcataaatggggaatgcgtaacgggaatactacccgcaatgcggacgaccagtgttgcggacaggtttatatcgaattgtataatatctgtcctgacccggagatgattaagaatatcaaggtcaatattgacatggtggttaatactccgcaggtgaatgattggtggtgggtggatgccatacagatggcgatgcctatttatgctaagctgggtaaactgacaggagagcggaaatatactgataagatgtgggaattgtatagctatacccgcaatgaatatgccaagaacggactgttcaaccctaaagacgggttgtggtggagagatcatgattttgttccgccttataaagaacctaatggggaagattgttattggagtaggggcaatggttgggcttatgccgcactggtacgggtgctggaagaaattccggcggatgaggtgcatcgtgcggattatgtcaatgacttcctggccatgagtaaggcaataaagaaatgtcagcgtaaggatggtttctggaatgtgagtttgcatgatgagacaaacttcggtgggaaagagacaagcggtacggctttgttcgtttatggaatggcttggggcgtgcgtaatggcttgttggataaaaaagagtatcttccggtattgctgaaggcctggaatgcgatggtgcaggatgctgttcatccggacgggtgtctggggtatgtacagggaacgggaaaggaaccaaaggatggccagccggtgacttatgataaaatacctgattttgaggattatggtataggatgtttcttgctggctggtacggaagtgtataaattgaattaattagtaacagatttcatagattatagtataattgataaaagaatcaattaggaggaaggaggggctgtgaagtcgttccttttctttttctttgcatataaatgataatttaccagcgtagcgctggagcaaggttctccttcggcgtgcaagtaatctttcagacacggatgacgtggattcttttttccttcggtgtgatatgccggtatgtatagcgcagctttaaaaatccgcgtcatccgtgtcatccgcgtctaaaagattaaagtccgcgttcgtccgccttatccgcgtagtccgcgtacccattccctcgccgctaaattatcatttattaatctgacgaattaactaactaacataaaatgaaagaagtatgagacagcttattgcattaataattttaggactatctataactttgaatgtcggagcacaaagttacaagttcgattttacctctggtaagaaaacgaaggacggatatatcaagataacatctgctgatcggtatgccaatgcgaaaggctacggatatgatctctctccgtctccggatggaaagaaccacgctcctttcttcttttcagttgccgtaccggacgggaattatcacgtcacagctatcatcggcagtaaacgcagtgcaggagagacaacactccgaggagaatcacgccgcctcttttacgaaaatgtaaaaacaaagaaaggagagttgctcccttgttcctttaccattaacaaacgcgatatccacatctccgacaaagaagatgtgcgcatcaagccgcgcgaacgcagcaagctgaattgggatgacaaactgactttagagtttaacggagatactcctcagctgaccgaactaatcattgagcgtatagaaaatgttcctacagtctttttatgcggtaactccactgtagtggatcaggataatgaaccctgggccagttggggacagatggttccccgtttctttaccgatagcatttgctttgccaactatgccgaatccggagagtctgccaatactttcattgctgccggacgtttgaagaaagccttgacgcagatgaaatcgggagattatatcttcatggaattcggacacaacgatcagaagcagaaaggtcccggcaaaggtgctttctattcttttatgacaagtctgaaaatctttgttgatgaagcccgtgcccgtggagtgcaccccgtattggtaactcctacccaaagacgcagcttcgatgaaaatggaaagattaaagatacccatcttgattttcccgatgcagtgcgctgactggcggaaaaggaaaatattcctttgatagacttgcatgccatgacgcgtattctgtatgaggctatgggagtggaggaatccaagcatgctttcgtacactatcctgccaatacctatccggggcaagacaaacctttggcggataatactcattttaatccgtatggtgcttatcagatagccaaatgcgttattgaaggaatgaaacaagccggattacctttggtgaagtacttacggacggataatgaaggatatgatcctgcctgtccggatgctcgcgaaacttttaagtggaatgaaagtccgtttacggaactggaaaagccggacggtaattgagagaggttttagggaaccaacctctctatatccggaatcactatttctccccggtgtaactccagcaggccgtcttcttgcatgccattcaatgctttcgatactcccaatcgtgtatcattgatggcatttgcaagttcttccatcttgattttcagtatcttttctccggaaggacgttcgatgtgggagaggataaaatctgcgatccgcgcttcgagcttctccggaactttcgtccacaaacggttatagcacgtttgtgcccggttactgatgatattcatatagttgaggcggaaaatttcatatctgaacaggtcgttcatcacaaatgccttactgatagttacggtatttacttctgtacgagctatgtgagtggatacgtaagacgtattcatgccgaacaaagattgcggttcaatcaggtatggtgcctgaaaatactccgtgaaggtgtaagagttatctgtggatgaggtggatgaagcgatttccccgttcaagataaatattaactgtccacatgttgttcctttttttactaaagtttctccagctttatgcttggtgaaatgtaattttacttttcccaatatattagtgaagtcctcatgagcgagtccttgaaacagtggcaattggagcagggtgtcatacatcgtttccatatctttatcaacttcttgtttgaaaacaaatgtaagcataatcgctatgtaccgtaaacactttgcctttctttttgttttttttattatttcttaaacgtgctattcattcaggcaattaaatcttgtggaatgcataaaaatcgattatctttgcaaaaaaaaggagggacacatgtttgcagcattcaatttacaacaaatgatcagtgcttttattgtactgttcgcagttatcgatatcattggttctattcctatcatcatcaatttgaaggaaaaaggcaaagaagtgaacgcgctgaaggctacgttaatatcttttgcattgttgattggctttttctacgcaggagacatgatgttaaagttatttcatgtagatattgaatcgtttgcggtggccggtgcatttgttatcttcctgatgtcgttggaaatgattctggatgtagagatatttaagaatcagggacctattaaggaagcgactttagtgccgctggttttcccgttgctggcgggtgccggtgcatttaccaccttgctttccctccgtgcggagtatgccagtgttaatattatcatcgctttggtgctgaatatgatatgggtgtattttgttgttagtatgaccgggcgtgtggaacgcttcctgggtaagggcggtatttatattatccgtaagtttttcggtatcattctgttggctatttcggtgaggctgtttatggcgaacattacgttgctggtggaggcgttacataaaacataaatattctccggttttaatctcttgttgaaatatggcttatactgggccttttctttattttgttgaatatatatttggaaaatatgcagcaaagctatacctttgcacccaaattcaagacaatgatgaaacatttatgtacatataatcctctgaaacgattgctgcagaacgaacaaatctgttgctgtagtgtcgtgcatgtacattggtttagcggtttcatctaagttatcctacattatttttcttttttgccggatacaataataccggtattctatttttcagttactaattattttgtaattgcggttgttgttgcatacttgccagtgggagcgaaggaataaactcctctgtccggcaggttgttgccccgcgtatgatctaaactagagttgatatgtttaaaatacttggcctgatgatcttaggcataataatcggttatggtttgcgtcgtatctcgtttttgcgcaaagtggaggtatccatatcttatacagtatttttgttactgtttgttttgggcgtcactatagggtccaacagactgattgtagataatctgttctcttttggatggcaggcagccttattggctttatctgctactgtaggcagcattttggcttcatggcttgtattaaaattgtttttcacttctaaaaagaaaaaggtatgaaagatagtttgattgtattgggattttttgtgggcggatgccttttgggagctttgggatatctcccggtggatttgaagacaggtaatatgtctatctatatattgtatgcgttgatgttccagatcggcatcagtattggttccaataaggaactgaagagcatgatttctcagctccgtctgaagttcttgctgattccgttggctactattggtggaactctgcttttctcggctctggccagtctgctgcttagccgctggagtatatttgactgtatggcggtggggagtggttttgcttattattctctttcttctgtgctgataacgcagttcaaggaagcttcaataggacttcaactggctacggagttggggacaattgctctgttagctaatatattcagggaaatgatggctctgctgggtgcaccgctattggtacgatacttcggcagattggcacctatatcagccgctggtgtcaattcaatggatgtgatattgcctgtaattacccgttattccgggaaagagatggtgcctatagctattttccacggcttactcattgatatgagtgtaccattctttgtttctatgttttgcaaactatgatgccggatcttcttccggtctattgcagtctgcctttgcttctgtattttcttcttcctcatattccttcccctctttaccggactcttcatcaggtgtttcttcctcatctgcaaacgggtccggtcgttgaggtccatattccatgaatgctatggcacagatagtgccggctatcgctccgctgaggtgtccttcccatgaggtggtttctttggcaaagaatgggaacatattccagataagcccgccatatagaaaggtaactaataaggagatggcaatcaatggtatatgctttcgcaggataccgctgaaaaaaaggaagaaggccaggccgtagatgatgccgctggctccgatgtgccatcccggtttacctataagaaaggtgagtgcgccgcagcctatccagatggcaaagaatatataggaagcaatgtgccggtaaaagtagaacaaacaccacgacagaaagaataacggcaaagtgtttgctaacagatgcctcaaactgccgtgtactaacgggtgcgcaaagataccgaatactcctctttgttccataggatacacacctaacctcctgaaatcccagtccataccgacttcaaggaactttagcaagtaaagaataaaaatgaggaataacggtataactgctgccagggctatccggcgtacatcttgcttcatctttcttactggtttctgttattttggtacaatgctacgaatatttaagtaaaaaacgaaaataaatgaactttttattttgcgtattgtctttaatttgtatttttggcatcagtaccatacccgtaggcatagcatgcgaggtatggaacatgatacctgaacaattaacctttaaataatgcacaactatgagttatttacgatttgacaagactctgatgatcaatctggaagaatctttaccaagggagatacttcggacaaataagtcaggagcctatcattgtacaacgattgtagattgtaacacacgcaaatatcacggactgttggtgatttccgtccccaatcttgacgatgaaaatcatgtgctgctatcttctttagatgaaacggtaattcagcacggtgcggagtttaatctggggttgcataaatatcagggagaccactttagtcctaacgggcataagtatatccgtgaattcgattgcgagcatatcccggcaacaacttaccgtgtaggaggtgttatcctccgtaaggaaaagatttttgtacatcatgagaataggattctgattcgctataccttggtagatgcccattcggcaaccacacttcgtttccgcccctttttggcctttcgcagtgtacgcgaatatacgcacgaaaatccgcaggcgaaccgtgactaccaattggtagaaaatggtgtgaaaacctgtatgtatcccggctatcccgaacttttcatgcaactgaacaagaagaatgaattccattatcagccggattggtatcgtggcatcgagtatcccaaagaacaggagcgaggatatgacttcaatgaagacctgtatgttcccggttatttcgaagtagatataaagaaaggagaaagtatcgttttctctgccggcatttccgaaatttctccgcgtaaactaaaacaaacctttgaggcggaagttgctgaccgtacaccgcgcgacagtttctatcactgtctgcaaaactcggcacatcagttccacaataaacagggggagaaccactatgtattagcgggatatccctggtttaagtgtcgtgcccgtgacttgttcgtttctttgcccggcttgacgttggcagtggatgaacaagatgagtttgaagatgttatggtaactgccgaaaaagctatccgggagtttatcagtggagaaccatcgagttataaaatatatgagatggaagatccggatgtattgttgtgggctgtatgggctttacagcagtatgctaaggagacctcacgtgagcaatgccgccagaaatatggtcgtttgctggaggacatcatggactatatccgtagccgtaaacatgataatctcttcctgcacgaaaatggcttactgtatgccaacgggacggagaaggctatcacctggatgaattctacggtgaatggtcgtcctgtaaccccgcgtacgggatacattgtggaagtgaactctttgtggtataacgcacttcgtttcatagccgatctggttcgtgaagatggcaatgtacatctggcggacgaactggatgcgcaggcggaagtaaccggaaagtcttttgtagaggtattccgtaatgagtgtggttatctgttcgattatgtggatggatttatgatggactggagcgtccgtcccaatatgatatttaccgttgccttcgattattccccgctggatcgggcacagaaaaagcaggtgcttgatatcgtgacgaaagagttgcttactccgaaagggttgcgtactctcagtccgaagagtggaggatataatccgaactatgtcggtcctcagattcagagagattatgcttatcaccagggtacagcttggccgtggcttatgggcttctatatggaggcgtacctgcgtatttacaagatgagcggtgtatcattcgtggagcgttatctgattggttttgaagatgagatgacgagtcattgtatcggttcgctccccgaactcttcgatggtaatccaccgttcagaggtcgcggtgcagtgtcttttgccatgaatgtggccgaaatactgcgcatcctgaaattgttgtctaagtataatttataagaggaggaacgaaaatgaaagttttaatgtttggatgggagttccccccgcatatcttaggtggcttgggaactgccagctacggtctgacgaaggggatgtcccagcaggaagatatggaaattactttctgtattccaaggccatggggcgatgaagatcagagcttcttacgcatcattggcatgaatagcactccggtagtgtggcgtgatgtaaactgggattatgttcagggacgtgtaggttcttatatgaacccccaactctattatgatttgcgcgatcatatttatgccgattttaattatctgaatacgaatgatctcggttgtatcgagttttccggtcgttatccagctaatttacatgaagagataaataactattccattgtggccggtgtggtagcacgccagcaggagtttgagatcatccactcacacgactggctgacctatccggcaggtattcatgccaaacaggtatccggtaaaccgttggtaatccatgtgcatgccaccgacttcgaccgcagtcgtggaaatgtgaatcctactgtgtatgccatagaaaagaatggtatggataatgctgaccatattatgtgtgtgagtgagttgactcgtcagacggttattaataaatattttcaggatccccgcaaggtatctaccgtgcacaatgcagtttctccgctttcacaagagatacaggatattgtaccgcagaagaagccgaatgaaaaagttgtgactttcttaggtcgcataaccatgcagaaaggtccggaatattttgtggaagctgctgctatggtattgcaccgtacgcgcaatatccgttttgtgatggccggtagtggtgatatgatggatcagatgatccgtttggtggccgaacgaggtattgccgaccgtttccattttccaggtttcatgaaaggaagtcaggtgtacgaaatgttgaaagcaagtgatgtgtacattatgccgtctgtttccgaaccctttggtatttctcctttggaggctatgcaatgtagtgtaccgactattatttctaagcaatccggctgtgccgagatattagataagtgcatcaagactgactactgggatattcatgctatggcagatgcaatttatgctatttgcacttatcctgacctttacgagtatttgcgtgatgaaggtaagaaagaagtggatgctattaagtgggaagatgtgggactgaaagtgcgccgcatctacgaagaggttattaaacaatataatagataacaataaaacaatatagatatgagaacgatctgtctttattttgagatccatcaaatcattcacctgaaacgctatcgtttctttgatataggtacgaatcattattattatgatgattatgccaacgaatacagtatcaacgaagttgccgaacgttcctatattccggcattgagcaccctcattgaaatggcgaaaaattccggcggtgcattcaaggtggctttgtctatttccggtgttgctttggaacaattggaaatccacgcaccggctgtgattgacctgctacaccagttgaatgatacaggttgttgcgagttcttggccgaaccttattctcacggcctttcttctttggcaaatgaagattgtttcaaggaagaagtgaagcgccagagtgctaagatgaaacaaatgttcggtaaagcaccgaaagtattccgtaactccagtctgatttactctgatgaaatagggggattggtggcaagtatgggctttaagggtatgctgactgaaggtgcaaaacatattttaggatggaagagtccgcactatgtgtatcattgtagctataaccagaacctgaaactgttgttgcgtgatttcaagctttcagatgatatcagtttgcgcttctctaattccgaatggaatgaatatccactgtttgccgataagtatattggttggattgatgctctgccacaagaagaacaggttatcaacatctttatggaacttagtgcattgggaatgtcacagccgctttcttccaatatactggaattcctgaaagcgttgcctgcttgtgcaaaggataaaggtattactttctctacaccgacggaggttatcactaaattgaaatctgtatctcaactggatgttccgtatccaatgtcctgggtagatgaggaaagagataccagttgctggttgggcaactgtatgcagcgtgaagctttcaataaattgtatagtattgctgaacgcgttcatttatccgatgatcgccgtatcaagcaggattgggattatttgcaggcaagtaataacttccggttcatgacgacgaagaatagtggtattagattgaacaggggaatctatgagtctccttatgatgcttttactaactatatgaatattttaggtgatttcatcaaacgggtagaatctctttatccgatggatatagataatgaggaactgaatgccttgctgacgactatcaagaatcagggtgacgagatagacgaattacacaaagaggtggaaaagttgcaggctaaactggaaaaagaaaagactgctgaggcaaaggttaaagctgctactgccaaagctaaaactcctgctgctacaaagaaaacagctgaaaagaaacctgctgcgaagaaaaacacaacaaccaagaaggaaactgccaagtagtttttcttcttaggagaaaatacatcaaataaaaagccttccgttcaaacagaacggaaggcttttttgtacctttacttattttgaggagaagtttatttattgaatgtagtataagttacttccaattccagagcttcacccttcggaccgcctttcaacattgcatatccaggttggagatcgttttggatacctgtcattgtactggaagtacttgaacttgtagtatcatatgtgattgaaacaggtatcagatatacagttctccagtctttttcccattcttcctgattccatttatcacctgcttcttctttggcttttttcattgcggcatcttttccttgaatgcaagtagtaactaaacgggcaatattattaaatgtgtactgattggttgccacattattatgctttacggtgtaagacgtgatgttgtccggcaatttgttttcttcaaagaaactcttgaagtctactttacgtagtagcaaaacattgcttggagcactcatgctgaactcgtatgggctatcttgcttattgtaattggtgaatgtcagtttcactgcattcagtgtatcattggctaacttctggtagatatcatcataaggtaattctgcctctgtgaaaataccagcgggagatttgatataagtatgttcctcttggtcagcaagtttctggattttatcggaattgaggaattgattagcctgaattacctctttagtagaagcaaattcagtccgccatgtgtgggcggtagagtcttcattctcgaaacctgcttgcttccgtttataaggtacattagttgcggtatctattacatagaattgatatttcatttgtaagtctacacgatctacgtaaagtactgttccatcaccataatcgcttttgatatatacgcccttaaatacgttctctataaaagctttagagttcttgaaatattcaggatgttctttactgagtttaagccacttgtttccataggtttccttgtctagcgtaaaagtaacacttggataataagttttattaccatatgaatctgttgcgttcctttcttcatctgttacgcttgtgtcgtaggctgtataggctctgcgacctaataaaatcggattcagtttatcgtaatactttgcaggatcaatattggtatagcgattacgttccaactctttttgcaattggtatgcactcatacggcaagcattcaaagaatctccaaaccaagtggaatagaaaacaactaagcgtacacctgctaccgtgtcttctgtcagaattcccgtctttttatcaaaatcatatttttcagggaatttgaagttatctatacagttcaactcagttaagaaactcgcttcgtagtatccgaaaagaggatctgtaaaacgccctacataacctgtactggttttggcaaatacagagtcagcgacaacggaacgtgtagtgacgggaaattctgtggttagtgcggaaataccgtcagaaccgggtaacattcctattcctaatgtaccggtattatcatcgcaaccaaagaaagtaagggttgctgtcaatagcagagcgcctaaaaacttcactttcatagttttctttgttatcttgtttatttttgttctgtttcccatactttgtcgtagaactcattacaagcatcggcaaatgtttcgggagtctgatattctaaaatgggttttccagattgtcgagcatattccatcacttcttcgttgactttttcgctttgctggataatgccatctgcataatcaatggccagtttgcacaacgtagcatagtctacaggagccttcaggtgagctacatccttctttgtaacacctttcaataccaatctgtttacaaaatcagcattaaacgattctttgaagtcatcttcgaaaacggagaatactactttagcgtcacggaatgaaggttcgtccttatatgctttctttatatacaaaggagctaaggcagtcatccagccatggcagtgaatgatatccgggcaccagcgtaacttcttaactgtttccaatacaccgcgtgcataaaaaatagcacgactgtcattatcttcatattccacaccattctcatccgctgtttccaggcggttttggaaataatcatcgttgtcgatgaaataaacctgcatgcgggcagactgaatggaagcaactttaataataagggggtggtcggtatcgtcaataatcagattcataccggagagacgtatcacttcatgcaattggtttctgcgctcattgatattcccccatttaggcatgaatgttctaatttctctgcctttttcctggattgcttgaggtaggtttctgcctacaagggacatttcggattctggtacgtaaggagtaatctcttgggtaataaataaaaccttgttcgcctttgtcataataacaatgttctcaattattctgcaaagatataaaaaaaatcgggcacttgagcaaataaggcgactctataattccttatgaattgttaactgcttgtttttcagtgttacattgcttcaaagcaggttgttgtccgagtagaacttttgcattaatttgcgatatttcttctttatatgctaaataatagtttattttgcaccgcttttgcgaacaactaagttattatataacctataaaaatggaaatagtacatactatcaaggacttgcaggccggactttcggctttacgggcccaaggtaaaaaggtaggattggtacctacaatgggtgccctacatgccggtcatgcgtcattggtgaagcgttgtgttgcagagaatgatgctgcggtagtgagtgtttttgtaaacccgacacagtttaacgataagaatgatttagagaaatatccccgtacgctggatgccgattgtgctttgttggaagcttgcggtgctgcgtttgtgttcgctccttcggttgcggagatgtatcctgaacctgatacgcgccaattcagttatgcgccgttggatacagtgatggaaggtgcgtttcgtccgggacatttcaatggtgtttgccagattgtgagtaagctgtttgatgcagtgaaaccggatcgcgcttatttcggagagaaagatttccagcagttggctatcattcgtgagatggtgcgccagatgaattattcgttggaaatagtgggttgccctataatacgtgaagaggatgggctggctctgagtagtcgtaacgctcgtttatctgtcgaagaacgcaaaaatgctttaaaaatatcgcaaacattatttgaaagtcgtacctttgcggcttctcatacagttgctgagactcagaagtttgtagaagatgccattgctgccgctcccggtttgcgtctggaatacttcgaactggtggatggcgacacgttgcagaaaatagccaattgggaagatacagcgtatgctgtaggttgcattacagtgttctgtggtgaagttcgcctgattgacaatattaaatataaagagtaataaacctaaaaagagagatcagaccttatgatgattgaagtgctgaagtcgaaaatccattgcgctcgcgtcacggaagctaacctcaattatatgggaagcattacgattgacgaggacttactggatgcggctaatatgattgccggtgaaaaagtgtacatagctgataataataatggtgaacgttttgaaacctatattattaaaggcgaacgtggttcgggcaagatatgtctgaatggtgcggcagcccgcaaggtgcagccggacgatatcatcattattatgtcgtatgccttgatggactttgaagaagccaagtcgttcaagccgtcggtgattttccctgatccggcaacgaacaaagtggtgaaataaacgggaagaaaagcgatggaaagcttgactttagttgtttgattccgtatctttgcctatgtaatcctgatttagtttcgggaacgaagatagtaagaggagtgacgtaagttacttctctttttttgtgcctgtatgtgggggttatcgaaagatactatgttttggttcataatataccatgtaattgggtaaaacatactatgtaatcgctcgaaacataccatctgtttagagcgaatgaatgatgtaatcgaagtaaacagatcatctattccggaaaaagaaaagcggaaagaccgaaatctttccgctttgttaatgttatgtaaacttgctcttgacaagtaatggcttttctgcttatttgctcaactgctcgtgcattgaggcagcagccttgcggccatcgcccatagcgagaataacggtagcaccaccacgaacaatatcacctccggcataaatggtcggaatagatgactgcatgttctcgtttacggcaatcgtacctttgcgtcccatttccagtcccggaatagaagaaggcacaatcgggttgggagaaacccctacactgacgatagccagatctatatcaatggtttccgttgcacccgggatagctacgggactacggcgtccggatgcatccggttcgccaagctccattttttgcaagataacctgttttacctttccttgctcatcggcgatgtattcgatagggttatgcagcgtgaggaattcaacaccttcttctttcgcatgttttacctcttcgatacgtgcaggcatttcttcttcggaacgacgatagataatcatggcacgttcagcacccaagcggcgtgcagtacgcactgagtccattgctgtatttccaccaccgataacggctacatttctaccgaaaggcaccggagtatcagagtcttcgcttgctgcatccatcaggttgacgcgtgtcaggtattcattggatgacaggatattgatggagttctctcccggaatattcatgaagttaggcaatccggcaccggatgctacgaatacacctttgaaaccttcttcttctaactgttccacactgatagtcttgcctatgatgcagtcctttatgaagttaactcccatcttggcaagattgtcaatctctacatccaccactttgttcggcagacggaattcgggaataccatacttcaatacaccgcctatctcgtgaagggcttcgaagacagtaacgtcgtaaccatatttagccatatctccggcaaaagaaagtccggcaggtccggagccgataacggcaatcttgataccattcttttccttgatttccggtacggaaatttgcccgctttcacgttcatagtcagcggcaaagcgttccagatagccgatagctaccggcttttctttcattttcaggtggatacattttgactcgcactgtttttcctgcgggcaaacacgaccgcaaacagcaggcagggcactggtttctttcagtgtcttggctgcttcgagtatttctccacgttcaatgtttttgatgaaacgaggaatgtcaatacctacgggacagccttccatacagcctggatttgcacaatcgaggcaacgcttagcttccgttagagcttgttcctctgtaagtccttgatttacttcttctttgcgactgtgcgaacggtattccggatcgagctcgttcatttcaacacgtggaatagcagtacgttctttcggtttcattgctttgcgaagttccagacgccaggcagcattacgacttttctcgtcaacttcttgtgtcggttccggtacagctttgcaggattcgtcttcttcaagcttgtgcatttcctcgcgttcgatgctcttgaaagcacccatacgcttcaacatctcgtcgaagtctacctgatggccgtcaaattccggtccgtctacacaaacgaatttggtctttccaccgatggtaatacgacaagcaccgcacatacctgtaccatccaccatgattgtattcagcgatacatcagtcggtatttcatatttcttagtcagcaaacaaacaaatttcatcatgatagcggggccgatagcaaaacatttgtttactttctcccgtttaatgacttcttccacgccttcggttaccaatcctttgcgtccgtaagaaccgtcatcggtcataatgatgacctcgtctgcgctttcgcgcatctctttttcaaggataatcagctctttgctacgtccggcaagtacggcaataacgcgattaccggcagctttcaaagcctgtacgatagggagcatgggagccacgcctacaccaccacctgcacaaaccactgttccgaagttttcaatatgagtagcttgtcccagcggacctaccacatcggtgatgtaatcgccctcattcagttcgcaaaggcgggtagaggagaggcctacttcctgtactaccaaagtgatagtgccgcgtacggtgtcagccgctgcaatagtcaatggcatacgttcgcctttttcgcctacacgtacaatgacgaagtgtcctgccttgcgtgagcgggctattaaaggtgcctcgatctctaatttaaaaaccttttcagaaaaatgttctttgctaatgattttgttcattatctataaattttgttggtataattacgtaatcactttcagattgttacggtttgcaaagatacgggttatttggtaaaaacaaagaaagtttcttctaaaaagctgtataactgatgtggacaaatgataattcgcccctaccaggttgtatagacgtaatcatataaacgtctgtggttacctatgtaggagcgaattattattcacccgctcgtatagcgcagctatttttagtcaatcatttcaaaacccgtatacggcaccaatgccttcgggatacggataccttccggtgtctgattgttttccagcaaagcggcaacaatgcgtggtaatgccaatgcagatccgtttaatgtatggcaaagttctgtcttcttttctccactgcggtaacggcatttcaagcggttggcctgataagtatcgaagttggaaaccgaacttacttccagccaacgcttctgtgcttcggagtaaacctcaaagtcgaagcaaagggcggctgtaaagctcatatctccgccacataggcgaaggatacgatatggcaattccagtttttgcaataatccttccacatgatccaacatctctttatgagattgtctggaatgttccggtttgtcaatgcgtaccaattctactttagagaattcgtgcagacggttcaagccgcgtacatctttaccgtaagaacctgcttcgcgacggaaacactgcgtgtaagcacagttcttgataggaagttgcttctcttccagaatcacgtcacgatagatgtttgtaacaggaacttcagctgtcggaataagatataaatcgtctacttcgcaatggtacatctgaccttccttgtcgggtaactggcctgttccgtaaccggaagcggcattaaccactgttggaggcatgatttccagataaccggctttgcgggcttcgtccaggaagaagttgatcaacgcgcgttgcaactgcgcaccttttcctttataaaccgggaaaccggctcctgttatctttacgcccaggtcgaaatctatcaaatcatatttctttgtcagttcccagtgaggcagtgcatctttggggagttcggtttccataccgcccattttctctactacattatcttcagcacctacaccttcgggtacttcatcataaggtacattaggaatggtatagagtagattctgcatgtcttcggcagcctgatccatttcagtctgcaaagtcttgttgacttctttaagttcggctacacggcttttggcagtttctgcttcctctttctttccttctttcatcaattgtccgatggatttggaaatcgagtttacttcagagaggttattatctaatatagactgtgtgctacgtcttttgtcgttaaaggcaattacctggtctattgtttctttcgcatttttgaaatgcttcttttccagtccgcggatcaccgcgtcggtgttttctgtaatttgtttgatggtaagcatatcttgatactttgttttgattaaaatcttgatttgagagcacaaagatagtgtaaatcagaagtaatgcaaaaaaaagaaactataaaaagaaagggatgcaatccatcagattgcatccctcatctttatttcttattctgaaacttacgcttctgtgctttcggcagggattacagatacataacgtctgtcttccttggttactttgaactgtacagttccgtctactaaagcgaaaagagtgtggtctttacccataccgatgttgttacccgggtggaattcagtacctctttgacgaatgatgatgttgcctgctttgcaaacttcaccaccaaatatcttaacgcctaatctcttgctctgtgattcgcggccgttcttagaactaccgacaccttttttatgtgccatttcttcttactgttttaaattgattaagctactacttctgtaattgttaactctgtgaattgttggcggtgaccgttcaacttgcgatgaccttttcttcttttcttgtggaaaatgagaactttgtcaccttttaccaggctggatacaatctggcaaacaacttttgcaccttctacagtaggagcacctacagtgattgcaccgtctttgtctaccaaaagaaccttgtcaaattctactgtcgtaccgttttctgcattctggatgtggtgtacaaacagctttttgccagcttctgctttaaattgctgaccgttgatttctacaattgcgtacatttcttatatatgatgtataagttagctccgtcgggtggtctctaatcacttagaaagcactttgtcgaacccggtgcggaataatcgggcacaaaagtacttcttttcttcggaacgggcaagtgtttcatcttctttttgcggaaaaaatggtttacctctattctatgtaaggaaagtggaacgggagcagtttcccgtttacaagaagttaagagtttgtcgacaagaagttaatttcttgtcgacaaactcttaacttcttgtaaacagaaaaaggactgcttgtaaccttttggtaatcagtggcgaaatattctcttgtttaaatcggaatgtatataaaacgtacttgagacctatttgctccgtacctgctccgtagcaaaacaggatgcgaaccggatttacctgaaaaattacaaaagtggctttagtatataaaccgccgcaactatcagtgccactacaataatagcaaagataataagcagtatcaaactatagaaaaacatcagtattgtagtccagaaacttctccaccaggtatatccatacagttgcttataatccaggcagaagagggcaaagatgaatagtatgggcaattcgtataaatcgcctacctgtgcactgccgttgaaagggagcactatgatactgagcaagagtatttggcaagcaatataagcctgtataaatacatgttctgtcagattatagtgcagtttgttctttttccgacggaaagccatgagcgttgccagagcaaagagaggtaatgtggcgataatacggaatgccttgttaccatgtccccaacttttcagtaagttccatactttttccagaaaaggtgtattgtgaatggctttttcaagcttattaaatactgatgacccaccttccagaagttcatctatgagttcgtcatcttcatcaccatttatttggagggtgatgttatcctttttaaaggtattttgggtttccagtttttccagatcctgattcagttcttttattgtttgggccaaaacctccttttggtctggtttcttggtctctttcatctgtttctgcaatagctcacgtgcagccatcagattattcttccggatgtccgtagaatcttctgtttccagattttccagtttcttatccagaccttctatcgttttattcaggatattttgggtagtcgggtctgttgctgtttctatacgtttttgcaattgttcacgtgcagcgactatttcttgcctttgagcttccggagactttccctttttctctttcaaggcttcaggatctaccagttgtacagccatgatgtaaagggcggcaagtacaaatagtgtctggaaggggcggaagtataagattcgtttgccggcaatgaagtctctgatcatgtaccccgggcggtagagtaaatccagaagtgttcgaccaaagccattatcaatattggtgaatcctcccaatatatttctgaatgcattactgaagcggtagcgaggagtgttccggctttgaccgcaacggttgcaataactacctgtatagacggtatcacaattcaggcagatgttactttcctcactgatgggcggaatctcttttccacgtaccatcttgatatgcaaggctcgaaggtacttcttacagggagtccaccagggggatataaaatctaatacacggtctggcagaatcctacgtttggtaagaatataccaaagtaccagtatgaaagaccatagaaaaacattgctatcttctccttcttcaaaagacagccatagcaatattgccaaaatcagtatttgccaaatattgatcatctttcttctgcggggagcgggagaaatgggagaagcagaaacagccggaactgcaggcgtactgacaaccggatgttgaggtatcactttattggcagtcgagtcctcgttgtcagcagattgtttatcatgggtcggtagttcgtcattttccagtagttcttccagcgaactcataatcttccagtgtggatatttggctaattcttcgatggtagttactccatgggttacacctgcaaagtctacacctgcagctttggctgtggcagcatctactgtactgtcaccaatatagagggtttcagctttggtgacgtgtaattgttttatggcaagtagtaaaccttcgggcgaaggtttggccgtttgtacatcttctccaccgataatgatattgaagaagctgccggggaaatgctggtcgagcatttccttaattcggtaacggtatttggtggagatgatacctatgaatgcacccgcatctttcagggccagcagtacagacttggtttccagaaaaagcacggtgtttattgtcatgtgggtgtccgcttctttcctgtattcacttttaaaaccggccagttgctcttcatccgttactcccgtcaggatagaaaaagattcttccaatgttttcccgatggtgcgtttaatgtcttcatcggttacatttgtataaccatgtttattgagcacattgcgaaagcaagtaacaatgccgcgagaagagtctgcgagcgtgtaatcaaagtcaaagagataagtcgtatagcccatgtcgctttttgcggcaaagttataaattaattggaattttctgactatatttgttcgcactatgaatttattttagaaactgctaagtgtttctttgcgctgagttgttccatacatacgttaactatgtaatattatgaaactatcagaattatcttttgggattttgcttcttttctctttttcagcgtgtgtatcccaacaaccggatgcggaaactgagtgttatgcaacagagtacgtcaatccttttattggtactgattttacaggaaatacttatcctggagcgcaggccccgttcggtatggtgcagttaagccccgataatggtcttcccggctgggatcgcatctccggttatttttatccggacagcacgattgcaggtttcagtcacactcatctttcgggtacgggagccggtgatttatatgatatatcttttatgcctgtaactctgccttataaagaagcagatgcgccgttgggcattcactctttattttcccatgatgaagaaacagccagtgccggatattatcaggtgcggctgaaagattatgatatcaacgtggaactgacagcaaccgaacgttgtggcatccagcgttatacttttcctgaagcggacgcagctatattcctcaatttgcggaaagctatgaactgggactttacgaatgatacccgtattgaagtagtcgattcggtaactattcaaggataccgtttttctgatggttgggcacgcgaccagcacatttatttccgtacccgtttttctaaaccgtttgcatccgtacagttagatactgctgctgtcattaaagacggtaaacgtataggtagctctgctattgcccgttttgatttccacacaagtgcaggggaacagattcttgtcaccaccgctatttcgggggtaagcatggaaggcgcagcacgcaatcttgctgctgaagctccggcagacgattttgacaaatatctggctgttacccgtaaaaactggaacgagcaactttccaaagtagaaatcaagagcaatgacattgatgagaaagttaagttttatacagccctttatcattccatgctggctcctactatctatagcgatgtggatggtgcctattatggtcctgataagcaagtgtatcaggcagacggatggaccaattacagtactttctcattatgggatatctaccgtgccgctcatcccctttatacctatattgaaccgcagcgtgtaaatgacatggtaaaatcctttcttgccttttctgaacagaacggacgtcttccggtatggaatttctatggaagtgaaacggatatgatgataggttatcatgcagttcccgtcatagtggatgcttacttgaaagggattggggattttgatccgaagaaagctttggccgcatgtgtagctacagccaatattgatgaatatcgtggaataggattatataaaaaatatggttatgtgccttatgatgtaacggatcactataactcggaaaactggtcactttctaaaaccctggaatacgcttacgatgattattgcattgcccgcatggcggagaaactgggtgaaaggcaaattgcagatgaatttgataagcgttctctgaattataagaatgtatataattctcagacaaccttcatgcaaccgcggaataacaaaggatccttcattgagaacttcagtccggatgattatactccgcatatttgcgaaagtaatggctggcaatatttctggtctgtgcaacaagacgttgatggactgatcagtctggttggaggcaaggaacgttttgcccagaaactggatagtatgttcacttacaatccttctgcggatgaagatctgcctattttcagtactggaatgatcgggcagtatgcacatggtaatgaaccgagtcaccatgtcatttatttgtttaataccatagggcaaccttggaagactcagaagtatgcagctgaggtgatgcatgagttatataagaatacacctgccggtttgtgcgggaatgaagattgtggtcagatgtctgcctggtatgtgttcagtgcaatgggattctatccggtagacccgattagcggcaaatatgagataggtactcccatgtatcctgagatgaagatgcatctggctaacggtaaaacatttacgatattggcaccggctgtcagcaaagagaatatttatatccagtcggtaaaactcgacggaaaaccttatgataaaagttatatcacgcatgagcaaataatgaatggttctatctttgaatttgagatggggaataaaccgggtaaagtgtggtatgagatagagtgatagggtgatagagtgatggatggtgccagataatataattgtgggattatgagtgataactttgacctgacttataaactccttttccgtaagtactacgccaatctgcttttctatgccacgcgcatcgtgggtgatgaagaggcggaggacgtagtacaagatgtatttgtagaattgtggcggcggaaagatacgataacggtaggagagcagatacaggcatttctgtatcgggcggtgtatacccgtgctttgaatgtactgaagcaccgggatatcaagaatacttatgaagctgtagtgacggagatcaaccagaaaagaatagagttttatcagccggacagtaatgatgtcgtgaagaggatagaagaccgtgaactcagaaaggaactctccgaggctataaatgaattgccggataagtgtaagacggtctttagactcagctatctgcatgatatgaagaataaggaaatagcagatactatggggatatcattgcgaaccgtggaggctcatatgtataaagccctgaagtttctgcgtgagaggttgggctacctgaactttatgttagtcctgtttttattaggtaaggtataagtgtttttatcgaaacggttgttttaatagtatgatgaaagaaggaatgaataagttggatgaagaattgatggccaaattccttatgggggaatgctctgaagaagagctctgtaaggtaaatgcatggctgaacgaatcggatggtaacgctcgtgaattgttcaggatagagcagatataccatctgggaaagagtgaagaatttgcggatgaaaagaagatagaaaaagctgaaaagcagctgttcaaacggctggcacaagaagaagctaaacgaaataaggtgagaagattgaatgcctggatgcggtatgctgctatgttcataggtatcttttttatatccggtttgagttattatgtttatcagtcacaaagtgaagagagcaaattggttgctgtcactgcccgtgatgaagtgaaagaactaatgttgcctgatggcactaaggtttggctgaacaaacatactactttaaaatatccacgtgaattctcagaaaagggaaggaatgtatatatggaaggggaagcctattttgaagtaaagcgaaatacggcgaagccttttatagtgcgcagtgaagccatgcaggtaagagttttgggaacagtcttcaacttaaagagtgacaagactaaccgttctgcggtagctacactgataaagggagagattgaagtgaaaggtaatcacgaagaaggcatgatcgtattggctccgggacaaaaagcggaattgaatgctgtaactcgccgtctggtagtgaaacaggtggatacaggtattgaaaactggcataataaccagtttgtctttgaaaaggctgacatatttacgattgcccgtactttggagaattcttatggggtgaagattattctggcgcctgatatggatgctacaaagacatattccggtacattaaagaagaaagataatgtcgaggagactctgaatctgattaagagtacgaatgcgcttcccattgaatataaaattgtgggaaatagtgtatttctgtcttcaaagaaataggtaaaaatcggaagtatataatcttaaaacataataatatgaggaaactgcttttatcgatttgctgtttaggctgtgctctttgggctcaagccaaagattttacgcaatacgtcaacccgctgatgggtacattgtcttcttttgaactttctacgggaaatacgtatccggctatcgcacgcccttggggtatgaatttctggactccgcagaccggaaagatgggagatggctggcaatatgtatatactgctaataagattcgtggtttcaagcagactcaccagcccagtccgtggattaatgattacggtcagttctccattatgcctgtaacaggcaaaccagagtttgatgaagacaaacgtgccagttggttctcacacaaaggagaagtcgcattaccttattattataaggtgtatcttgccgaacacgatgttgtgacggagtttacgcccacagagcgtgccgttttgttccgtttcacttttccagagaacgagaattcgtatgttgtagtagatgcttttgataaaggctcttatattaagatcattcctgagcaaaataagataatcggatataccacccgtaacagcggtggagttcctgataacttcaagaactatttcgttatagaatttgataagcctttcagttatcaggcttctgttgctgacggcgctttggttgaaaaccagagtgaacaaacagcaggacatgcgggagccatcatcggtttcaaaacccgtaagggagaaattgtacatgcccgtgtagcctcctcctttatcagttttgagcaagcagacagaaatctgaaagagctggggagtgacagttttgaaactttggttcagaaaggacaagatgcctggaaccaggtattgggaaaaatagaagtggatggaggtaaccttgatcagtatcgtactttctattcctgcttgtaccgttcagtactcttcccacgtgctttctttgagtttgacgaggctggaaatccagttcactacagtccttataacggagaagttttgcccggatatatgtatactgatacaggcttttgggatactttccgttgtctgttccctttccttaacctgatgtacccttcagtaaacaaacagatacaggaaggccttatcaatacatataaggaaagtggcttcttccccgaatgggcaagtccgggacatcgcggctgtatgatcggtaataactccgcttctatacttgccgacgcttatctgaaaggtattaaagtggatgatgtaactactttgtacgaaggtcttatccacggaacaaagaatgtgcatccggaagtttcttctaccggtcgcctcggttatgaatactataatgaattgggatatgttccttacgatgtgaaaatcaatgagaacactgcccgcactttggaatatgcttatgatgactggtgtatctaccagatggcaaaagctctgaaccgtccgaagaaggaactgaagctttttgctgaccgtgctatgaattataaaaatgtgtttgataaggaaagcctgttgatgcgtggacgcaataaagatggacagttccaggctcctttctcacccttgaagtggggagatgcctttacggaaggaaatagctggcattattcctggtctgtattccacgatcctcaaggtttgattgatctgatgggtggtgaaaaagtctttgttgaaatgttggactcggtatttatcgttcctcctttattcgatgacagctattatggccaggtaatccatgaaatacgtgagatgacggtgatgaatatgggtaattatgctcatggcaaccaacctatacagcacatgatttacatgtataattatgccggacagccctggaaagctcagtattggttgcgtcaggtgatgaatcgcatgtatacgcccggccctgatggctattgtggagatgaagataacgggcagacttctgcctggtatgtattctcggcattaggtttctatcccgtttgtccgggaaccgatgagtatgtcttgggtgctcccttatttaaaaaagcaacgcttcattttgaaaatggcaattcattggtgatcgatgctgctaataataattctgaaaatatgtacatcgaatcgctccgtttggatggaaacgtgtatacgaagaattatctgaagcatggagatctgttgaagggtggtgtcttgaaatttgatatgggtagcaaacctaatttacaacgaggaacacaggtggaagattatccgtattctttctccaatgaaataaaaaagaaataaaaaactgaagttaataatgtaatgaagaagggaataggaaataaaactattccctttttcatttaatgaaaaaaaatatcattttgtactaagtgtattttctagggtcgttgttttatatatgacgatcaggaaatagagtctcccggtcgattaaaattaaccaatgtgtaacctttaaactttgtttatgaacaacaatcatgcttttcaaagttcgaaatttctacgagctttattagtcttgttcttcatgactgtatccgttcagtggacctttgcccaactgaatttgaatgtctctcgtacgacgttaggtacagttatcgaacagatcaaatctcaatctaagtatcaatttttctatgacgacaagctcgctactatggcagtggagaatgtcaaagtgaagaatgcatctatagaagatgccttgaatgctatcttgaaaggaaaaaacatttcttttaaagtagaagataacattgtttatctttcagagaagtctgctgcaccgcaagaaggtaatcagcaaggtaaagaacggaccattaccgggcaggtatcggatgatatgggacctcttatcggtgtgaatgtattaataaagggtacaagcattgggtgtatcactgaccttgatggtaactttacgctgactactactgaggcaaatccggtggtacagttctcctatgtgggttacaagccacaggaggttgcagccaaagggcagaatgctatcaatgtgatgttggaaactgactcacaactgatagaagaggtggtggtaacggctttgggtatcaagcgtgcagaaaaagcattgagttataatgtaactcaagtaaatgcagagtcagctttagctgtgaaggatgcgaactttatcaattctttgaatggtaaggttgccggcttgaatatcaatgcttcttcttcaggtgtcggtggtgcaagtaaagtagtgatgcgtggttccagaggaattgaacagtcttcaaatgcactttatgtaattgacggtatccctatgtacagtctaagttctgccggtggttcaagtgagtttgactcacaaggtactactgaggctattgccgatattaatccggaagatattgaatcgatgtctgtgttgtcaggtgctgccgctgccgctttgtatggtagtaacgcttccaatggtgctattgttatcacgactaagaaaggtgcagcaggacgtgtttctttaacagtatctagtaatactgagatgttgaatccttttgtgatgcccaaatttcaggattggtatggtacatcaggtactgacggaagctggggaacccgcttaaattccagcaatcgttatggctatgatccaaaaagtgattatttccagactggtattattggaacggaaactttctcgctatctaccggttctgagcataatcaaacttacttatcagctgctgctgtaaattctcgtggtattgtccctaataataaatatgaacgttataactttacattccgtaatacgactcagttcctgaacgataaaatgaaattggatgtaggtgcacaatatataatgcagaaggaccgcaatatgactaatcaaggtatttatgccaatcctgtagcttctgcttatttattcccacgtggcaacgattgggaagaatataagatgtttgaacgctatgatccagttcgtaaattatatacgcaatattggccacagggtggtggttcatatcgtttgcagaatccttactggattaactaccgcaatttgcgtgagaacgataaagatcgttatatgttgagtgcatctttgtcttatgatattttggattggttgaatattgccggacgtgtgcgtattgacaattccatgaatacttatactcagaagtattatgcttctacagagccgactattgccgaaggttctgaaaacggttattatggtgtaactaatacgcgtgacaagcaagcgtatgccgattttctgattaatataaacaaacgttttggtgaaaactgggcactgactgccaatatcggtgcttcttattcagatactcgttcttcagcgatgggagtaaagggacctattcctgttgatggattggctaattatttctctataactcagttggataaacaaactactaaacgtgaagaaagcggttatcgtgagcagacacaatctatctttgcttctgccgaagttggctataaaagtgcttattatctgacactaaccggacgtaatgattggccttcacagttggcaggcccaaagtctgtacagaaggggttcttctatccttcagtaggtgcttccgttcttctttccgagatattcactttaccagaaagtatctcttaccttaaactgcgtgcttcatgggcgtcagtaggcttgcctttcaagcgcttcttggcttatcctactttcgaatgggatagctcaaccggtaaatatagcaccaagtctgcctatcctttgtatgacttgaagcctgaacgtactgattcatgggaagttggtcttaccgctcgtttcttgaaacatttcaatctggatatttcattctataacaccaagacgtataaccagactatggatacccaagaaccggctaccggaggttatagtaccttctatgcgcaaactggtaatgtacgcaaccgtggtgttgaactttccttgggatataagaatacttggaataagttcacttggaataccaattatacattcagtgccaataaaaacaagattcttagtttgattgacggatatgtacatccggtaactggtgaagtcgtttccaagtcacaattggatatgaaaggtttgtcacatgctcactttatattgagggaaggtggttctttgggcgatctttattccatgtctgatttgatgcgtgatgcaaataataatatttatgtggatgccgacggagctgttaagaaagaaaatctgaatgatggtattaaactgggttctgtattcccgaaagctaatatggcatggcgcaatgattttcaatataagaactttggttttggtttcttgctgacggctcgtttgggtggcattgtttattcggctacacaagctactcttgatgctaatggggtatctgaagcttcggctatagcacgtgataatggaggtgttgtcatcaatggtggagatatggttgatgcagaaaagtggtacacggcgataggtgccgacagtggtattccgcaattctatacatatagtgctaccaacttacgtttgcaagaagcatccgtcagttatactattcccagagtaaaattgaaaaacgtgatggatattaccctctcattggtgggacgtaatctgtggatgatttattgcaaggctcctttcgatccggaagctgtagcttctacgagcaacaattattatcagggtatggactactttatgatgccaagcttacgtagtgtgggattcaatttgaaacttaaattctaaaagattgaaaagtatgaaaataaatagtacaatagcaaaattcatggctgcgggagcaatgttgttcggtagtgtggcttgtacaggagattatatagattataataagaatccccatgaaccgggtttggaagatatggtaccggatgattatctgttcagtgcccttctactgaatatgcaggatgtgatgatgcctgagcaggaaaactttgcccaatatgtgagttgtctgatgccgggtggattctctggttacgtggctgactcaaacttgggtactgggtggtcggggcgttatgccacttataatccgtctgaagattggctgaaaatacctttttccgacttttattctaagttttaccctaactattttcagttgaaagaacagtgtactgacgaattgtacctttcattggctgaattgtatcgtatttgtacaatgatccgtgtaacagatacttatggaccgattccttattctcaggtaggtgtgaacaatgccttgaagtctgcttacgactctcaggaacaggtttatacaaaaatgttagctgatttggataatattattgacgtactaactacttattctgcccaaaacttcaatcctagtggtgatcgtatttatgatggtaatacgaaggcatgggctaaatttgccaattcaatgaaacttcgtatggctatgcgtattgtatatgtcaatgaaaaccttgcaaagcagaaggcggaagaagctgttaattcagaaataggtgtaatgactgctaactcggatggcgcttatcataaaattgtagaccataatccatgggaacgttttatgccgaactggaaagatgcccgcatttcagctgatttgatttgctatatgaatggttacagcgatcctcgtcgtggagcctactacggcatatcaacattttcttcagaaggtgcttataagggtacagaagattacgttggtttgcgtcgcggtatcagacaaggccagttcaactcctggtcacagggctgctcttgtatgaaggtgacggtgagtgatgatatgctaatctttcctgcttcagaagttacttttttgcgtgcggaaggcgctctacgtggttggaatatgggcggaacggctaaagctctctatgaggaggctgtcagactttcttttgaagaacgcggagtttccggtgtagacacgtatcttactaattctaccgggattcctacagtttataaagacccgctaaaagggcaagacggacagaaatatgattattccggttctaccaattctacggttactgttgcctgggatgaggccgatggctttgaaacaaaactggaaaggatcattacccaaaagtggattgctatctttccgagtactatggaagcatggtctgaatatcgtcgtactggataccctaagttgatgccgatggtacacaatctgagcaacggtgtagtgagcgatgccgaaggagctcgtcgtttgccttatcctgcagatgagtatcgcgagaaccgtgaaaatctggatgctgccgttttggcgctgactaaggaatcaagtaataagaagggtgatacaatggcaacccgaatctggtgggattgtaagcctgctaaataatcactcaaaataatcattgaatagtatgaaaagaaataaaagtaataagatatttggagcgttgcttcccatattgactatggctttattggtatcatgtactgatgttgaaagtatcgatataaatcgcccgggactcgaagaacagagtccggaactttatgccaaatatttggagaacttgaatacatataaacgttctgatgagcataaagtggcgtatgcatggtttgacaatagtgtaaaagcaccttatagtcgtgctcatcatatttcggatattcctgatagcttggatgttgtttcgatgatgtatccggcagatttggccgaattcgagttgacagatatggctactgtacgtagaaaaggtacaaaagtggtttatacaatcagttttgaccgtatacagaaagaatatacagataaagtgaaagagggggtagagacaggcacttttagtgtttatttgaaggcagaagtagataggctgataagttatgaatcttcttttgacggtataattgcagaatacaaaggaaaaaatcctatttatatgtctgcggctgataaggaagaggccaaggcgaatcaggatattttttggggagcggttatggcctggaaacaagctaatacaaataagttgttaacttttcagggttatccggagaatctgatagggcaatctgtactgtcagaatgccgccatatcattctggcaacggatgacgtagatgctattgaggaattatcggtagttgcacgtaaggctatgctttcggctggtaccccgacagatcgttttgtagtggcggtttcgactatctctatggatgctgccgataccaaaaccggattttatgaaaaggcaagagctattaaagaagctgcttattggattacggaaccctctgctgactataccagagctggtattgcgatatacaacattcagaatgattattataatgctgatgctatatatccatgtgtgaaagaggctattaatattatgaatccttctcctcgtaaataaaagaataatattatgaaactgaaaaatttatatttagtatcaatagcattattggctgggatgtttgcagcttgcagcgatgatactgagaatttcgataaccgtgtgtatataagcacttctgtcaaggccagcactgtactgctgaagacagaaacagcggaaggtcaattccaattggctttggctaaacctgaagaaaaagatataaacgtgtctttaaaggccgatatgtctttggttgaaatgtataatgccgtttattatgataatgctcagagtctgccggcggaatactattctttagagaatacagaacttgttattccggcaggtactgttacctcggaggctgtaatggtaaaattcaagaatctgttaagtttggatagtgagcaggtatatgtattgcccgtaactattgcacaggcaggcattgatgttttacaaagtgcacgtaccatgtattatgtcttgaagggtgccgcattgataaatgtagtgggtaatattaccaaaaattctattcatgtagattggaagaggccggaagtggctaataatctgagacaaatgacagctgaagcattgatccgtgtcagcaagttcgacaagatgcttacgacgattatgggcattgaaggacagttcctgatacgtatcggagatgctggcattccgcagaatcagttacagatagccaaccctgatcataatgtaacctctgccgatctggctattcctacgggagggtgggttcatattgctgtgacatatgatgcagatgccaagaagatgatagtttatattaatggtaagaataaactggaagatacggtagatgctggtgctgtaaactgggggcaaaccatgacagatgaagggaatggtttctggattggtcattcttataaccgtgaccgttggttggaaggtgaaatttcagaatgtcgcatctggaacaaagtattgactgcggacgaaatcaatgctaaaaaccatttttatttggtggaacctgattcggaaggactggtggcttactggaagtttgatgaaggaacaggtcagacagttactgattatacaggtaacggaaataatgggatggctctagacccgatttcctgggttgaagtggcattgcctgagaaataaatcattttctttaaataaaaaaacagatgcttattatgaaatatctgaataatataaaattaagtttggtgactgccgtatttgtatgcaccggaacagtctttactggctgtgaagatgaccttacaataagtgggtctactgacaagttggagactgtggacggtgtatatggctatgtaaggtctgcagccggagcgcgtgaactcactccaattactctatttggagataaagcgggaacaggacatcttttctttgagctgactaaggcagcagagcaagatgttacggtgactttcaaaatagacaaagatgctttggaagcatataatgaggccaataatacatcttacgaaatgtatccggttgataaattgagtttagctaatgatggtaagattacagtgaaggccggtgaaaagaagtctgcttcgatggaattgaatatcaatgcgggaggcacgataggtacaacttacgctgtagctgtttcggctacagcagacggtggtgcaactgtttctaccaataatcagacatacatttatttggtaaagccacaacctgcatatcctgtgcgtggaactgctcgtgatgttaaaacactttgttttgtagaggtgaataatgaaaatattctgaactgcggtgaatatacgatggctaaggatgggactcctttctttgatgtagtcagcatttttgccgctaatatcaacgtggatagtaaaacgggacgtgcgcatatattttgtaatgatcaagtttctttcttgttgaagaatgctgatcagattattcgtcctttgcaggcaaaaggtattaaggtgaatatgactatactgggcaatcacgatgaatccggtatgagtagtttatctaaggaagctgccgaagattttgctaaggaattgaaagcttatgctgatatttatggtttggatggttttgattttgacgatgagtattcaaattattcggagaatccaagtccggggtttgaagagcgttccagtgcaaattattgccgtttgatatatgagtgccgtaagattatgcctgacaaattattaggtatttatgaatatctgctatatgatgctcctaacggttctgtggagggcaaaagtgcaggtgaattggtggattatatgtgctatggaacttatcagagatatgcgaaagggcgtgaggaaaactttacagggttgcctaaatccaagtatggtccttattcattgaaaatcaataatgagtataatggtggctggagtggttttaatcaagaaactattcaaaatttgaaagatgcgggatacggtttacaggtgttctataatcctgaacccagaatttacagttacgaccattacttcacagcagtatcaaaagtgttgtataatgatgaagtggagtggactggtaagtattacaatagaactgattttacatctattcagggaacgaaattggcttatgagtcttatctcggtgagtgggcagctacttctagtaattctttgtacatatatatcgatgaagataacaatccacgctggtgggattggagcggttcgcaaaagttcaatgtccgtattgaagaaaaagaggcaggaaagagttactatatttatggttggggtacttatcctgaaattactgagaaataccccttggtagctgaatatgatgcagtcaaaggctatatttccatttatccgcaggtgattcacgaaggtgatgctgctgaccccgagacttgggaagtacattggggaacttatgccggaagtggcgctaattgctattggagagcttatcctcaatatgctaattatgccattgagggtagtatcaatctggacggttcgttcggtcttgtgggagtgggtaatcgttggggacttgacccgtatcatgaagtggatggtacgctggtagtgccccatatggatgtgaaatatcatattacagaaaactacacattggtgaagaactgataagattagtgtttaacctttgtcaatacgagccttgtcttgacctcaggatgaggctcgtaatataatcagcaatatgaaacagcattttatatcattagtcctatttttctcttttctgttgagcggttgtatgcctctcaaacagacagaggtcacttctcccaatgggcacatccgtttagcctttgctttggacggtaataatcgcatgacttatcaagtcagtgtaggagacaccgtcttcatcgccccttctttattaggtttcacagccaaggacggagtgaatcttgccgaaggtttcaaggtcataaacactgacttcaccacctatgacgaaacctggacgcagccttggggagaaaacaaaaccatccgcaaccattacaacgaaatggctgtccacctgtccgatacgacaaatacccaattaaccctgcgctttcgcatcttcgatgatggattgggatttcgctatgaatatgaagttcccggagttgacagtattttggtgacagacgaactgactgcgttcaatatagtacaggatggcatctcatggtccatacctgccaattatgatacttatgagttgctatatcgtacacagcctgtcagccggatagacaatgccaatactcccatgactttcaaaaccggaggtctatatgccagcatccatgaagctgcattgaccgattttccggagatgaccttgaagaatacgggaaactgcaattttaaatccgaactggctccttggccggacggcataaaagcccgcttcaacggaggaagctttaagacaccttggcgcaccatacagattgccccgaaagcagtcgggcttatcaactccggtcttatcctgaatctgaacgaaccctgtgcgctggaaactaccgactggatacgtccgatgaaatatgtaggtatctggtggggaatgcatctgggagtggaaagttgggtgataaatgatcgtcacggtgccacaacagagaacgcaaagcggtacatcgactttgcagcggccaacaacatcgaagcagtgatgtatgaaggctggaatgaaggttgggaaaactggggcggttctcagacgttcgactatacccgtccgtatgccgattttgatatagaggaaattgcccgctacgcccgggaaaaaggagtcgggattatcggacaccatgagacgggaggcaatattataaattatgagaaacaactggataagtcatataaatggtatgctgatctgggcattcattctgtgaaaaccggttatgcaggcggacttcccgacggacacaatcatcacgggcagtataatgtgcgtcattatcgcaatgttgtagaaactgcggctaaatatcacaccaccctcgatgtgcacgaacccatcaaggacaccggaattcgacgtacataccccaatatgatgacccgtgaaggtgcccgtggcatggaatggaatgcttggagcgaaggtaatccgccggaacatcatgtcatgttgcctttcacccgtttgcttgccggaccgatggattatacgccgggcatattcgatatcatgtacgagcgtgccaagaactctccttatcgcaagcagtggaatatgaaagacagcaaagattgccgtataaactctacgctggcgaagcaaattgcaaactgggtgatactttattctcctttgcagatggctgccgatatgattgaaaactatgaaggtcatccagctttccagtttttccgtgattttgatgctgattgcgactggtcggaagctttggcgggtgagccgggggaatttgtggttatcgtacgccgggcaggagagaaatacttcctgggtgcagctacgaatgaggaagcccgtgaagtcactgtcgcgctggattttctggaaaaggataagacgtaccgggcggtcatctatgccgatggcaaggatgctgactgggtgacgaatcctacggcctatgaaatcatagagaagcaagtgaccgctactgatattttatcagtgaatatggcgaaagggggcggacaggccattacctttatgccactttgatatgaatatgtaatactattgagatatgaaaaatatgagatttaattccatgatgatgggtggaattctgttgctcgggatgtatggttgcactccgaaaatgcaggactattcatcgtacgtcaatccgttcattggtacgggaggacatggacatacctatcccggggctatagtgcctaacggaatgatacagcccggtccggatacacgcatttatcagtgggatgcctgttcgggttattattatgcagattctaccattaacgggttttcgcatacgcatctcagcggtacgggctgtggagattatggtgacgtattgttgatgcctaccgtgggcaggcaagattatcatgcgatgggagaggagagtcagcagatggcttatgcttccgctttctctcacgagaacgagacggcccaacccggttattattcggtatttctggagcgctataaagtgaaggccgaactgaccgctacccggcgggcggctattcatcgttatacttttccgaaagcggaagatgcgggattcatccttgacctggattacagtctgcaacgccagacgaatgaagaaatggagctggaagtaatcagcgacaccgagatacgcgggcgtaagaagacggtatattgggctttcgaccaatacattaatttctatgccaagttctccaaaccttttacctatactttggtgaccgattctatggcattggaccaaggcggcccgttgctgcccacagctaaagcactgttgcagttccagaccggggctgatgaacaagtccttgtgaaggtcggagtttctgccgtggatatggacggagcacgccggaatgtggaggctgatatacccgaatgggactttgacggtgtgcgcagtgccgcccgcaattcatggaacgattatttgtcgaaaatagatattgaaaccaacgatgatgatcagcggattatgttctataccgcactttatcatacgggtgtgcaacccaatctgtttacggatgccgacggacgctatctgggcatggacctgaagccccaccaaggcagtgtggaaaatcctgtctacacggttttctcattgtgggatactttccgtgcctatcatcccttaatgacgattatcgatccggatttgaatcaggcttttatccgttcgctcatcctgaagcagcgcgaaggcggcatcttccctatgtgggaacttgcaggcaattataccggaaccatgattggctaccatgccgcatccattattgctgacgcctacacaaaaggctatcgtgattttgatgtgcaagacgcatacaaggcttgcatccgtgctgcggaatatgacactaccggcatcctgtgtcctccgctggtattgcctcatctgatgccgcaagccaaatactggaagaataaaataggctatgtgccttgcgataaagacaacgaatcggtggccaaagcattggagtatgcttatgatgactggtgcatttcgctattggcggaagctctgggtgatggccctaatcgggaaaaatatgccgcattcgccaaaggataccaggtttatttcgacgcttccactcgcttcatgcgcggactggacagtgaaggcaactggcgtacacctttcaatccccgttcttccaatcaccgcaatgatgattattgtgaaggtaccgcttggcaatggacctggttcgtgcctcatgatgtggacggattggtagatcttatgggaggccgggaggcttttatcggcaagctggactctttattcatcgctccttcggctatggaaggtgaatcggtatccgttgacatttcaggtctgatagggcaatatgcgcatggaaatgagccaagccaccacatcgcacatctatataactatgtcggtcagccttggagaacgcaggaattggtggacgaggtgttgcacacactctatttcaatgatccgaatggattgtcgggcaatgaagactgcggtcagatgtcggcgtggtttgttcttaatgcaatgggattctatcaggtatgtccgggcaaacctgtgtattctatcggccgccccttatttgataaagcaaccattcacctgaaaggcgggaagactttcaccatcgtaacacataacaatagtcgcgagaacaagtatgtgcagaagatggtcctgaatggtaaagaactgaatgcgcccttttttgcacatcaagatatgatagacggtggtactctggaattaacgatgggcggtgaaccgctgaaataaaagtcaaataggtatgagtcgaaatagtcgtaatccgatttcctgggtacccaccgtctactttgctatggggcttccctttgtggtgctgaatatggtatctgtactgatgtttaaaggcctgggcatcgatgatgcgcagattgctttgtggacatcactgattatgttgccctggacactgaaattcctttggagtccgttcttggagatgttcaaaacgaagaaattctttgtagtgttgacacaactgattacgggggcaggctttgccctggtagcgttggcgttgcatcttccggctttctttgctgtatgtattgctttactggcgattattgctttcagcggggcaacgcatgatgttgcgaccgatggtgtttatatgtcagaattgaataagcaggatcaggctaaatatatcggttggcaaggtgctttctataatattgctaagattgtcgcatccggtgggttggtttggttggcagggtggttgctgaaacactatgggggagttccaggagcggaggagactgttcgtcatgaagccactgtgcaggcttggatgacggttatgttcattctggctgttgtaatggtattgctgggagtgtatcacatgcgtatgttgccttcgggaggcactgctgccacgggcacgacatccggcaaggaaacctggaaccggttggtggaagttatccggaatttctttcagaagaaacatatctggtattacattactttcatcattctttatcgtttggccgaaggctttgtcatgaagatagtgccgttgtttctgaaggcggaacgttcagtcggtggtctgggactgggagaacaggagatcggtttgtactatggtacttatggggcggctgcatttgtgctgggttccctgttggccggctattatatatctcacagagggttgagtcgcacgctgttttcactgtgttgcattttcaatcttccgtttctggcttatacgctactggccatttatcagccggagaacggcatgttgataggcggtgccattgtgcttgaatatttcggttatggtttcggattcgtaggtttgtcgctgtttatgatgcagcaagtggcacccggtaagcaccagatggctcattatgcttttgcttcaggcatcatgaatctgggtgtgatgttgccgggttctatcagtggctttgtcagtaacgcgttgggatataagacattcttcatcttcacgatgtttgctactattccggcattcctgataacgtattttgtgccgtttacctatccggatgaaaagaaaaaatgatattattaacaatataaataagaagaattatggacagtaaaattataatgccttgggaagaacgtcctgaaggttgctcagatgtcatgtggcgctattctaagaacccggttatcgggcgttaccacattccgagttccaacagtattttcaacagtgcggtagttctgttcggagatgggtttgccggtgtgttccgttgtgacaataagtcggtgcagatgaatatctttgcgggctttagtaaagacggaatcaattgggagataaatcacgagcccatcagctttaaggcggggaatacggagatgatagagtccgagtataaatatgatccgcgtgtcacctggattgaagatcgttattggattacttggtgcaatggttaccacggacctacaattggtatcggttatacattcgacttcaaagaattcttccagtgcgaaaatgccttcttgccttttaaccgcaatggggtactttttccgcagaagatagatggtaaatatgctatgttgagtcgtccgagcgacaacggtcatacaccgtttggagatatttacatcagttacagtccggatatgaaatattggggagaacaccgttgtgtgatgaaggttactcctttccccgaaagtgcatggcagtgtacgaagataggggcaggttctgttccgttccttactgaagagggctggttgatattctatcatggagttattactacttgcaacggtttccgctattctatgggagcagccattcttgataaagagaatcctgccaaagtgttatatcgtacccgtccgtatctgcttgcacctgctgctccttatgaattgcagggagatgtgcccaatgtagtatttccttgcgcctctttgcaggatggagataaagtagctgtatattatggcgctgccgatacagttgttggcatggcctttggctatatttcggaaatcatagaatttacgaagaaaaacagcattgtatagttaatcccttaaagaatcagtcgactatgaaacgtattttattggcttacacactttctgccctttgtctgcttccggcgtttgccggaggtggagagggggctttacctataagctatgtcaatcctttcatcggtactaccaactttggaactacgaatccgggagcggtctgtcccaatggaatgatgtccgtggtccccttcaatgtgatgggatcggaagataataagtatgataaagatgctcgttggtggtctactccttacgagtatcacaattgttttttcaccggctattcgcatgtcaatctgagtggtgtagggtgtcctgaactgggatctttattgctgatgcctactacgggtgaattgtccgtagattataaagagtatggaagtcgttataaagatgaacaggcttctccgggatattacagtaatttcctcactcgctataatgtaaagactgaggtgtctgccactccccgcacgggtgtttcacgttttacgtttcctgccggactgagtcatgtattactgaatttgggtgaaggactgacgaatgaaaccggtgctttcttgaaacaggtgagcgacaccgaatttgaaggtatgaaattattgggaactttctgctataacccccaggcggtatttcccatttattttgtaatgcgtgtcaacaagcaaccggcatccagcggttattggaaaaagcagcgtcccatgaccggagtggaagctgaatgggatcccgacaacggacgctacaaactttatacccgttatcgtaaggaaatagccggagatgatatcggtgcttttcttactttcaacacgacggaaggtgaacagatcgaagtgcaaatgggagtttcttttgtaagcattgagaatgcccgtttgaatctggatacagagcaaagtggaaagaatttcagtcaggtattggctgatgcccgtatgcgttggaatgaggatctttcgcgtatccttgtcgaaggcggaacggaagaacagaaaactgtcttttatactgctctttaccatacattgatacatcccaatatcctgcaagatgtcaatggtcagtatcccgccatggaaagtgatcagattctgacaacaaagggagagcgttacactgttttctcgctttgggatacgtatcgtaatgttcaccaactccttacgttggtttatcccgaacgtcagttacaaatggtgcgttccatgctcgatatgtatcgcgaacatggttggctgcccaaatgggaactctacggacgtgaaacgttgactatggagggtgacccgtctattcctgtcatcgttgatacctggttgaaaggcttacgtgattttgatatcgatctggcttatgaagctatgtataaatctgccactttgcccggtgccgagaatttgctaaggccggataatgatgattatatgtcattaggatatgttcctttgcgtgaacagtacgataattcagtttctcatgcattagagtattatattgcagattattctctttccctgctggcggatgcattgggtaaacgggcagcggaacagggtaaaaaagcagaagcgcggaaatatcaggctgatgcccgtcttttttataaccgttcattgggatataaacactattatagtaaggaatttggtactttccgtcccattctgcctgacggtcagttctattcacctttcaatccgagacagggagagaattttgaaccgaatcccggttttcatgaaggatgtgcctggaattacagtttctatgttcctcacgatgtgaaagggcttgcccgtctcatgggtggacagaaacctttcattgaaaaacttcagcgtgtctttgacgatggtctctatgatcctgccaatgaacccgacattgcttatgctcatctcttttcttatttcaagggcgaagaatggcgtacgcaaaaagagactcgaaggcttttgcagaagtattttaaaaatgctcccgatggtattcccggtaatgatgataccggtaccatgtctacctgggccatctttaacatgataggattttaccccgactgtcctggtgatccgtattatacccttactacgcctgtattcgacaaggtggtgattcgtcttgactctgatacttggggaagcgataagctggtgatagaaaccgggcgcccttcaacagagtctttatacattcgtgagatggagttaggagggaagaaattatcccgctaccgtatcagtcatgaagaactggtaaaaggtggagtgctgagatttatacttcgatagtataaagaagagaagataaaaacaactttgatcaaaaaaacgggtgatcacaaaccacttgcgatcacccgatattttcattgttttcgtgtttaggtaatgttagtaaagagagaatttatagtattttatttcataggttccactgtataacctttttctttcaatagcttcaataccccatttgttcctggcagatgtcctgcacccactacaaagagagtaggggtttctttcatgattgaaggcattttctcaatccaggctttgttgcggttgtctaacagatcttccatttctcccggttgagggtcacaagagttgccgtcacgctcttccatcagtttcaacatttcgtccaggttttgagctttataggcattgttcaggcgtttggtttgatccatagctttatcgatgtcacttactaaacagtaaagcagatttgcctggcgttgcaatgtctgactattgagcagtacgttgatttgtgatatcggagtttccaaaccgcctactttcttgccactctgtatagcttgttgttggaagtaagtatccagttgttcttgtggattgaaaccacccaaatgcttcatacataaaataagagtcaattgctgggtgatgaaagccggtttcattttagctaacatggcaatatccgccatcaggttttcttttacagccttacctactaactcatattgttcgggggtgaagagaacttgaagagtcgtgtctcccgccatcatcatgttttgctgcatcgtttgcatgaattcaggagacattgcttcggacataactacttctccatatacttgtgaagtaccgtctactgcctgtggcaagccggcaatgctgtcttttatgcttagcggagctaaatggtgcgttcctaaaatatatgagggcttttccaggccgttaccggatattttccagagtaactgcgcattggcattcagtgcgatgccgataaaaaggagaatacctaaaatctttttcattatttttctatttagagttcatttgaatattgcttgttattttactcgtcctccgcgaagccagtattgcgtgtagtattgctcgttgagactgctgacaataactcctttacttgtgctggcatgtatgaatttcccatttttaagatagatacccacatgggccactcttttcttggacgcacgactggtgaaaaacaccaaatctccctcacgcaggttgcgacgggagactttattgctttctttgagttgttcatcggtgcttctggataaacggatgttgtatacctgcttatagagttgtgataccagtccggaacaatctgttccgcgtttgttgtcaccgcctgcgcggtaggggacacctatccactccgcagaggctatgtacaatttgtggttatcttccttatttatgtctattcccatgcggacagaagcttttgccagcgctttgtagtcgagacgaggtgctgatgtatggcaagaacttaaactaaaggtcagtccgataagtgcaactatataagagaggtatttcttcatgcttgttcctctttctcttccggttgaacaattgtttcctgaacgggcgtttcctgaactggcacttcttgaattgctgtttcctgagccgtcatttccattttctcttcttcaatttcttcttctactctgacattaaaatagtcttcaagctctttttcagccgaattattctcattctgaatatcacggataatcactccattctccatcagagcaatacgcggacacacatccaccgtatggttcaggttatgacttgaaataatgactgtggcatggtgatcttcattgtattttttcagcaggtgcttgatgatggactgtgaactcggatcaaggaaattgaacggttcatccaggatcagcaattgcggatgatgcagcatggcggagataatacctattttctgcttgtttccggcagagaagttacggatgaatttcttttgtccgaggacttcgttactcatgaagcgttcaaatggaagcagacgttcgtctacctcttcttttttcagaccgtacattttaccgatgaagtagaaatattcttcgggagtgaggtaatcaatcaggaaaccatcatcgatgaaagcacctgtgaattgtttccagtcttcatttttggatacatcgatgtcattgattgtcacatttcccagatctgcctgtagcaggtccagtatcagacggaagagggtagtcttacccgcaccattgttgcctaccaatcctaacatatcgccttggtagatgctatatttctcgatatctacggctttcttttcgccgaagtttttttgaagttggttaatctctatcatattcgttattatttttgtctactatcgtgaaatccttccatattcttatatcggcgcttcataaagcgatgatatacattccgtaaccaccatcttgaagttgcgatgaatagtatgccgacaactaagagaatccatggggttacttctttgcccaccgtcgcattcagtacgaaaaatagtagcaacggcactccgaatgcacctcctgaaatgaggttctgcaaaccggtacccacattttgccgtccggtcattttggcgtttaggtcgagcgtcttgttgttgtacactgccaactgaaacagacagaagtatacggcacccggaacgaatataatccaagcgatgcattccaatacagatactttacccgtcaccatacccggtatcatcagcacaaacgggatgatgagtgcgatgctgtacaagatgtatttggcacgcaacaatgaatagatggactccttgcggctcatcagtccgtcaatgtagttgccttcgtagctcatcagcggagagaggaacagaattccgaagatgatatagttgtaaagtacgaagaagtcgcgggagccaccatcgtaaatatcagaaaaactgatggtaagactgaaaatcagtactatagcggtaacggaataaagtgacttcctgcacaccttgttgcgtagtagcaatttcaactccagccggatgtattcgcctatttcgccataacggtccaggaacttgtattcggatactgtttttacttgaacggtagtgtcttctgttttattcagttcattgtagaccagtttttgcataatgctccggttgatgaaccacataagggaaatggctaccaagacacagataaatgtgagtatgtttcccgtgataaatccttcacccagatcaatgaagaaaccgaataacggactgtcatctggaacgaaaagtgcagctgcaatacctccgtatacgactatcggcaagagaacccaccagatgcgttcgtccatcagcgtacgacatagcagataccagtaattattgaatacgatgagcaaccaaataccaatgcagtaagtcaatacacctcctattccgtaaaatttggtaacagtgataatggcgaacggaacgaacaggaagagccaaagcaaattaaagctgttaagtcccgagcgtaggagcaggaagtcgataagacgactccttttgatggggagcagtaagtatggtttaacttcctgtgtcggtgttttcaggaagggtaaccgcaaaaggaagtccagggcgagtatgaagatcaggccgctgttcattacgtgataggcttctttggcgcctccgtcgaaggcgaaagcgaatgttgttccgaagaaaatgagataccctgcccagaatacactcatgaagtacatccaaaactttccgaacttacttttctcgtacatcggatgccgcttttcagctaactttccgtgtctgcgtagctcaagaaatagattcatgctgtttagtgattagttgttagtgattaatggagtgattagaaggtagtgattagtaataagtaagaatgcactcgcttatcactaatcacttatcctttatcactatttgttgggtaccgtcatggttacctcgatttcatttccttgtttcaacaggtcagatacaaacttttgaatatctttagctgtgatgctatttacgatatccgtgtatccttctgtcatatccatgccataatagaagtaatcgttcagattattcatccagtatccgttttctttctggttgtcggcatacttcttcagcatgtactcttttactttctgcaagtgtacgtctgacggtccttcggctgcaagtttcttcaactcgtctactacaatacctgccagtttatctttcttagcaggatcggtctggaagacaatctgcaacaataattgttctttcggatacttctgtaagtcgccaaaacagttcacaccatatgtaccaccttctttttcgcgtacttcttcagtataaaccatatcaagaacctgagttgcaaagctcagcaaaatgtcattctttagagtataaggagctctaccgctgtacaggaatacgattgttgctgtaggagtttgttgctctttggcatattcatttttgtacacacctttgcgtatactcatcttcgtatctttgaaggtctctttgcgattgatggcaggcagtgcacctaagtattcggcaatcagtggtttggcagtttcaaggtcaatgtttccgacaaagtagaatgtaaagtcgctggcatctttgaaacggtcgttgtacatttccagaatacggtcgtaatcaatctgatccaccatttccggtttcatcattactacacgcgggtgattattgtacattgctttctgtaaagagtcgtttatagaagaaagaggatttgcctgcgcactttccaattgggctttcatacggtttttaaaagattcgaatgcttccgcatctttacggggagcggtgaaggtgagatatgtcagctgcatcatagtttcaaaatcttttggtgagcaggtaccgaatacattctctgtggtagcacccagaccggcattgacggaaactttcttgccagccagtactttcgtcaagtctacttggctgaagttacccaaaccacctacagctattacgttgtccataacagcgaagttcagtgcgtctttgtcggggaaaatggatttaccacccagactggtacctttcatgcggatttcatcagctttgaaatcagtcttctttacatagacagttacaccatttgaaagaactaattttgtactaccatagatatcgccttctttctcagaaatgattttaccacctttcggagcttctttcatcagcggttcgtcagatactttgtctacgtatgcttgcaggtcgagatctttcatacctttcagtaagttgataacttcttcttttgtcgggtatttcaagccttcttttgcaggaccggcaattataactacttgattgctatccggaacgagttgctgcattaccatattcatggcctgtaagggaatgttaggagccagttggttcatcatagcgtactcagcttcaatccccgggataggctcgccattcaagaagttctgtacatattctcttacgtaagaaccgtgcttggtcttttcgcgttcgttgtaggcagactctaaactctgcaaatagttggcgcgtgcgcgtgcatattctgattcggtaaagccgaagcgacgtgcacgttcagtctcttgtagtaaagttttcaaggctgtttcaatgccgtcggctttacttgaggcagaaagtgcgaaggcttctttggttttggcgacaaagaagtcgctatagtaactgcttgcgcgggtaaacggtgggttagcactttgcaccaattcgctcaggcgggcgttcaacatactactgatcatgctcgtcatatattgtgaagcaaggtagcctacattattcttttcagaatcaggagtcgcatcttgcttgaagtaaatctcaattgatgggtcgtctacttccttatctgtaccgatagctacgatgggttccttattatcagcaacaggatagtaagtgcgttctgccggatttaccggtttttgtacatcggcgaatactgcctttagtttagcttctacggtgtctacatcgatatcacctacgataacgataccttgcagatcaggatgataccatttgtgatagtaatcgcggatatctttataagggaagttgttgattacatcaatagagccgataggcatacaatctgcatatttgtcaccctgatatatagttgggagcaggtcagtgtagacgcgcaacataccactgttgcggctgcgccattcttcacggatcacaccacgttctttgtcgatttcatcgtctttgagtaggatatagttagaccagtcgtgcaggatcagcagacaggagtccaatacaccggtgcggtcaatcggagcattactgatgttgtaaacagtttcgtctatgctggtataggcatttaagttagtaccaaatttgatacctacggtttcgcaccaagggatgacgccgaggcctttgtcatcaccggggaaattcttagtaccgttgaaggccatgtgttccaagaagtgggcgagtccgcgttgttgcggttcttcaagaatggaacctactttctgggcaatatagaactcagcccgattttcgggtaatttgttgtggcgtatgtaatacgtcaggccattgtctaattggccgatacggacatttttgtccacgggaaggggcggaaactgcatttgctgcgctaccgcttgttggaaaccgacacatagaacgaatgctactgccagtaaactgtgaaataaatgtttcatgttgatgaaaattaaaattgtttcttgacctatttgtcgaagagggagaggagaaatcacaggaaggatatattttttatatgaatgataatttagcggcaaagccgctaaattatcattttatcgcctcacgaatccgtaccagtttcgtcagtagtccttccagtaaatcgagcttcagcatattggcaccatcgcttttggctatttcggggtgctcatgtgtttcaataaacaatccgtctacaccgaccgcaacaccggctttggcaacggtttcaataagctgcggcataccacctgtcactccgcttgtctgattgggttgttgcagagaatgtgtaacatccagaatgaccggataaccgaaggtttgcatttcaggaatgccgcggtagtctacaacaaggtcttgatatccgaaagttgttccacgttcggtaatcataacttccttatttccggcttctactaccttttccgcagcaaagcgcatggcgagtggagacaggaactgtccttttttgatgttaaccacctttcctgtttttgcagcagctatcagaatgtctgtctggcggcaaaggaatgctggtatttgcagtacatctacatattcggcggccattgcggcttcttctgcagaatgtatatctgtaacagtaggcacaccaaaagtatcgtgtactttctgtaacactttcaacgctttttcatcgcctattcccataaatgaatccaggcgtgaacggttggccttgcgataagagcctttaaatacataaggtatttgtaatttctccgtgatatttaccacacgttcggcaatacgcattgccatctcttctccttcaatcacacaaggacctgccaataaaaagaaatttccggcaggattattctttaattcaatcataagtaattagtgtatagtgcttaacgttaatcgttattcttagttgggtataatcaatgttatcgcttcatgcataattccgatgtccagtggaaaatgccggtcgagaatacgtccgtccaagtccaccgaagcattttgtgcacgtagtacttttactttctgggtacggtaaggcatcacgactttatgattcaaaatacgtccctggataagcatccacagtcctgatacgagttgtaacagctccggacgatagataacggatacatcgagccaaccgttatacggcacggcacttggtgcttgtccgtatccccatgcactgccaatacataccgtcatgatacgtccccggatgtgttctccgtttattttgagatgcatccggtagagcttccgttcaaaaaaaagtgagatgagggccatgagataggacaggaatttcactccccagaaacgtttggtctggtcggaaatcttcacgatacgggctcctaaaccaatgttgattgcattgaggaaatagcgtgttacatgcttttcaccatcgtaatagttgcaaaatccgacgtctatcttccggcgtcggttatttatgatgcaatctacggcatctttgtattccgaagtcatttcccagtatttggcaaagtcatttccgataccgttgggaatgatacctatggcgatttctcttttatcttctgcattggacgacatgataccgttgatggcgtcgtttagtgctccatcaccgcccaccacaacaatggtgcggtatccattattggcaagaatgccggctaaacgttccacagatccgaacccttcagactgcacatagtcataagacacgcctcggctgtccatatattctttgatttctttccaccgtttctgcactttccgcgtgccggctttgggattgtatatcactccccacttttcgggttctacgctcatattgttatctcttagtaaagtcctacataatcatttttgtactctcctcgcagtctttgtctttgttgccccaaagatactaattccctgcgagttttgcttgtacaaaagcaatcttttcttccataggcagcccggcatccatccaatggatagtaaagccgcgtcgttccattccccggaaccaggtcatctgccgtttggcaaactgatgaatagcaatctccagttccctgtacatctcttcgtatgtcagtttgccgataacgtacagggtcaggtacttgtattccaggccataatagataagatcatccggttggataccctgttctatcaggcgtcgtacttcatctaccatcccttcgtccagacgttgacgcaggcggttggatatcttcgtacggcgtaattcccggtctatatctacaccaatgataaggctgttcagtttcgggaacgcccgttcgtctaccggtgtatgtgcataatattcttctatctcaatggcccggatcgctcgttttacggtgtcgacatctgtagtattatgcagggctttgtattgcttcagcatctcagtcagttcttccagggatttatcggcaaggcgtgcgcgtaactccgggttttcgggaactggcagcaacttatagcccttcaatacggattccagatacataccggtacctccacacaaaacgggaagtttccctttttgtttaatagtctcgtacgctatcagaaaatcacgctgatattcaaaaacattgtatttataacccgggtcggcaatatcaatcagatgataggggattggtttaccatttacagtgtagtctaccaggtctttacctgtaccaagatccataccacggtagatttgccgggaatctgcactgatgatttctgtgtcaagaacatctgccagtgctgcggcgaaaggagttttaccggaagcggtaggacctaatatagctatcaaatcatagtcaggcataagtcgttttgattatttttctacaaagataatgcaaaccgaaagcaatacaaaataagcttgattatttttaatgctaaagtgcagcttgtcttcgttttaaagctaaatatgaaaaaggaagtgaaaaagagaatgccttctcttaaatggtgttataaatgcgttgttttcgcacacggaacttgctactttcaaaaaagtgcgtacctttgcactgtgtttttcatagtattagatttaaggttaacaaaggttggagtacagcggtactccttttttttatgtctatacctcatctcttcaatattgaaatattcatttcattcatacctcatttgtataccatattcatatgctgtgtggatatgttacatcattgaaagtatatgtaacagatatgagaaagtatgtaataccagtataaatacgtgtagcgcaatgatgcagatgtattccagggaattggataaatttgcagaaataaaaaaagaaatgatatagggaaattaggtaaaggtaaaatgaaacttcagttttcagtgaataggtttaccaaattaggttagttaattatttttaggtctgtgaggttgtgtttgtgaaaacacaacctcatttatatggtgataaagatgtatatttgcaatactaaaagtatatgccaagctatgaaatacatattgattctgctacttctgttgatttttccactatccggtattgcggaaaagcattgtgtctttactccaattaacggaacgcatggattgtccggaaataaggtgcgcaatatcactcagttgccggacgggcgcatgatgataactacggaaggattactgaacttatatgacggtactaatttcagttacctgcactatgatcgggaagatatctgccgtttatcagattattccggatttcatcacgaatatatagatgctcacggatatatgtggcttaaaaatcaacgccaactgatggtggtggatataggacgtgaatgctttattgagcgaccggacagtttgctggctttatgggggatagatactccgatgaaggattttttcatggataagaccaaggatttatgggtcataacggataaggatgatttggtacgcatagataagacaactctgcaggcaagtacttttctgaatcgtgtttcattgattggagataccaccgatcaggtttatgatcttggggtgttggacgggaacttatatctgttctatcgttccggtttattgatttgttacgctatggagtcacaaaaggaaatatatcggcagaaactgtcggatgaacttcctgaaggagtgtatgggaatacatcttacgtagtgccgggaacgaatactttctaccagttatgcaatggtaacagaggcggggtaatgttggcttatgatgtagaaagaagaaaatggaacatcgtgttgcagacaagctattggctgaattacctgtctgttgataaagacggaagcatatggattagttgtcataaaggattatggaatatagatgcggggctggaaagaaaacaatatataccaaccttgaaattagtggacggacgcaatataaatacagaagtgagtacgctttacaatgacagccaaggtggcatgtgggtagggaccttgaaccggggaatcctgtattatcatccggaccgtttccgttttcagaatattggcaggacattgtttcccgttacggaaaatataaatctttatgtaacttgcattgcagcacaaaaccaggagaatatgtgggtggggacccggaaaggactattctcctatcatctttctaatggagacataaacttatattccaaggaattgtccactgtcaattgcaataccctgtttaaggacagtcggcaacgtacttggttgggaagtgtcggacagggactttattgtatgctgccggatggagaaaccagacattatccgttgtccggccagacaattcattccattatggagcaaccggacggaactttgtatttatgtactgaaaaccagggtttcggtacatttactcccgaaaccggacaatatgaaaaggagcagggagtacctcagacggagaatttgactgtctaccaattggcatctttggggaaggatcgtttagcaggtattacacggaaaggttggtttgtttatgattgtacccaaaaagaatatacctttaaccccagttttcatgtatgtacttccatctttgtagaccgacaaaagcaagtttggattggtctggaagatgggttgttgctttgcaacatagctaccggacaacaaaacacgtttcataccacggacggcttggtcaataactctatccgttccatcattcaaacacaagatcatgctatctgggtatctacttctaacgggataacacgtatcactgtaacaggagagggagaacagatacgatattcgtttgctaatttcaatcggtacgatggtgtgattacggatgaattctgcgagcggtcctcttttgtcgcagaagatggaactctctactggggtggcattaatggatttaataagtttgttccgcttcataccacaatggagcgggcgtatgccgcacctttattcgtgggctttgatctgtttggtgaacgtgtggaaagtggaaaaatgtatcatggtaacaggatacttcaacgccccataaccttgaccaaagagattatcctgaactatgatcagaactttttcactttagagttttctgccttgaattatatcaatcccacacagacctattatcgttaccaactgacgggtattgactattcggaacgggaaatccgctcttctgatggtaagggtactgccacttatactgacttgccgcctggcacttacactttcagagtgcaagccgctgataatagtgagtcgtggacgggaaaatatgcggaaattgaaataaccgtaaaagctccgttttggaaaaccacttatgcttatctctcttatttcctgttcgcaacgggaagcttgatcgccctagtttttgtatatatacgacgcaaacgccgaaaactggtacgtgaacaaagagagaaactggatgaaatgaagtccactttcctgcaaaacatcaatcaggaactggcagaacctatcaatcgtataatctctcccttggataccattttaaaacatacggatgaaggcagaaccaaactgcaattgaaggaaatacagaataatgccgtagagctgaaagaactggttgaccagctttcggaaggagtcctgtcccctctgtcgcctgctgaaaatgagttggctttggaagaactgttgatgaatatgcgccagttgctggaacaacaggagaaaaggaaagaacaactgaaagcaactccggaagctgcgccggacaactccttgctatcggcggccgatgaattgtttcttcgtaaggctttgaaatttgtagaacagaatctggacaatcccgagtattcagtagaggtattgagtcgggacatgggaatggatcgcacggggctgtatcgaaaactggtttcagtggtaggaaagacaccgacaaattttatccgttccattcgtctgaaacgtgccgcacaacttttggaagaaggacatacggtggccgaagttgccgaccgggttggattcagtacatccagttatctgagtaaatgttttcaggaagagtttggtatgcgtcctttgcagtacgttaatagtctgaaagaacaaccgaaatagtcacatttcaacgagattgttgcttcttgcaacatttgtaccacgtgttttataggcttcaggctacttttgccctcataattcaatttttaaacgaaatatcatgagaaaagtaaaagtaggaattaccggtatatttcttttaatatccggtttactgatggcgcaaaatgtgaataggacgccacagggtgtaaaggtaaatgtggcggaaggaaacttcaatgcagaagttattttttattctccttctattgtccgcatagtgaagtatccttcggtaaaggagcagatgccggacaaagaaagtctttccgtaacattggtgccggaacaaactaagattgattttaaggaacagggagatgatgtcagactgaaaacgtctgatatgattgttactttaaacaagaccgatggaacggtacgcttcaccgatacaaaaaacaacgaattactggcagaaaagggaaccccttctttttatccgaataagggcaaagccgataagggcacttataaagttcgccaggcctttatgcttgaaaaagaggaggctatatatggattgggaatacttcagaatggtaaaatgtcgcaacgtaaccaacggaagtatctgatgccgggcaatgtggaagacggaattaccttcttccagtccgtgaaaggctatggtcttttctgggataactattctccgactaactttgctgatgatgagaatgagacttcatttgaatcggaagttggtgattgcacagactactatttcatgtatggtggagatgccgatggcgtagttgcccaaatgcgtactcttaccggacaagtacccatgttccctttgtggacgtatggctactggcagagcaaagagcgttataaaagtcagaatgaagtactgggcgtactgaacaaataccgtgaattacagattcccctggatggtatcgtgcaggattggcagtactggggtagtaactacttgtggaatgcaatggaatttttggatggtaattactataatccccagcagatgctggatgagattcatgcaaagaatgcgcacatgattatcacgatctggtcttcattcggtccacagaccaagccttataaggagctgaatgaaaaaggactattgtttaattttaggacttggcctcttgcaggcaatgatacgtggcctcccagagaagactatctgtcgggcgtgagagtttatgatgcctacagccccgttgcacgtgatatttactggaaacatctgactcgcctctatgatttgggtatggacggttggtggatggactccaccgaaccagatcatctggatgcaaaacccgaagattttgatacacctacctatttaggttcattccgcaaagtacgcagtgcctatccgttgatggccgtaggtggtgtttatgatcaccaacgcgctactacttcagacaagcgtgtgtttattcttacccgttcaggatttgccgggcagcagcgctacggatgtaatgtatggtcgggtgatatcgtttctacttgggaatcattgcgtaaacagatacctgccgggctgaactttacccttacgggaaatcccaacttcaatagtgatatcgggggcttcttcttaggccattacaacaagggatggaatgatggatcggctacaaagaatccgtcctatcaggaattatacgtacgctgggtacagtttggagcgttcaatccgatgatgcgttcgcacggaacggaagctccgagagagatttatcagtttggaaagaaaggagaacccatttacgatgctatcgaaaaagctatccgtttgcgttattctctgttaccttatatatattctacttcctggcaggtcaccaataagcagtcaagctttatgcgtgcgttgatgatggattttgccgatgacaagaaggtgtgggacatgaatgacgaatatatgtttggcaagtccatcctggtggctccgattgtggaagcgcaatatactccggaagtggcagctactgcatcggaagagacaggctgggacagggatgacaataaaaataagagcaaaggcagcatgacagtagacttcactacaaagaaaactgcaaaggtttatctgcccgcaggtactgtatggtatgatttctggactaatgagaaatatgatggcggccaggaaatatcaagagaaacgactattgatatgattccactttacgtcagagccggaagtattgttcccatcggccccgatgtgcaatatgcgacagaaaaagcctgggataatcttgagttgaaagtgtatgcaggtgcgaatggcagtttcaccctttacgaagatgagtttgataattataactatgaatcaggagcatatacggaaattcctatgacatggaataatgcttcccgtacgctcactatcggtgcacgcaagggaaaatataacggcatgcttgaaaaacgccagtttacggtgaagacagtggacggcaacagcaagacggttacttatactggaaagaaggtgacggtaaaactctgaccagatggagtaacttcactttgagtgtgatgcctatcatcaatggtattgatggtgggcatcatcggcattgttgataggctaaggccaggggacatgagtgatggaggtaaatcaaaggtaagatgcaggtttagggccgaccagagccattttttgagcggatgttacatcaatgtaagtttatgtaacatgaaaagacgggatgtaacattgaccgtagcaaatgggaacacgaagattcgaaaagtactttgtaatgaactatctttgtacaaaacgaaggttaattaaaaagtatcttaccatgaaaacaagaattagttggattttttattgtttagtaagtttcatgttacttccctctttgtcggcggcagagcgttttgtgacaaatgagagtaatggttttacctggatacagcaaggaaaggcgtatccgatactggtagactcgcaggaagataaaggtgtactgagggctgttgccaatttgcagacagatgcaggtaaagtgacaggcgctactccggaaattattcattccccatccggtaaccgtatactgattgtcggttctgttgaaaatagttcctggatcaaacagctggtgcaggcaggaaagatcccagctgcagatttgaaagggaaacgtgagaagtacattcttcagacggtgaagcagcccgtggaaggagtagaagaggcaattgtcattgctggtagtgacaagcggggaactatttacggtatttacgagctttcccggcagatgggtgtctctccctggtatttctgggcagatgttccggtggagaagcatgatattatatctattaaagaaggtgtatataccgatggtgaaccggcagtgaagtaccgcggtattttcctgaatgatgaatggcccagcttaggcggctgggcgtctgctacctttggtgggttcaatagtaagttctacgaaacggtgttcgaactggtgcttcgcctcaaaggaaattttatgtggcctgccatgtggaacagtgctttctacgatgatgacccgatgaacggtccgttggccaacgagatgggaattgtgatgagtacttcccatcatgaaccgatgggacaggctcaaaaagactggaaacgtcgtggaaaaggagagtggaattacactacgaacggtgccgtgttgcgcgacttctggcagcaggggatggaacgctgcaaggattgggaagcggtgatcacccttgccatgcgtggcgacggcgatgaaccgatgagcgaagatgccaatatctccttgttgcagaatatcgtgaaagatcagcggaaaatcatagagaaggtaaccggtaagaaggctaaagaaactccgcaggtatgggcgctttataaggaagtgcaggattattatgataaaggtatgcgagtgcccgacgatgtaacgctgctgctctgtgatgacaactggggcaatgtacgtaaattgcccgacttgaaagcgaagcctcgtaaaggtggttacggcatgtattatcatttcgactatgtaggggctccccgtaactccaaatggataaatattactcagatacaacgcacgtgggagcagatgatgctgacctatgactatggcgtgcgcgaattgtgggtggtgaacgtaggtgacttgaagccgatggaatatcctatcactttctttttagatatggcctgggaaccgaaacgtttcaatgaaaataatctgtttcagcatacggtggatttctgtcgtcagcaatttggcggatactatgccgaagaagcggctcgtctgatcgacacttatactaaatacaaccgtagggttactccggaaatgttgaatgatcggacttacagcctggaaaattataacgaatggcaaagtgtaaaagatgaatacgctgcattgtgtctggatgccttgaaactttattatctgatgcctgccgaataccgggatgctttcgaccaactggtacttttcccgatacaggcatgttccaacttatatgatatgtactatgctgtggcaatgaaccgtaaactggcagaggccaatgatgtgaaagccaataaatgggcggataaggtacgtgcttgtttcgagcgcgactccgtgctgacttatcattataatcatgtaatgagtgggggcaaatggaatcatatcatggatcagactcacatcggatatagatcctggaatgatccgaagcgcaatataatgcctaaagtgacctttgtacccgagccccgtatagctcctgcaccacctgtgtttgtagaaaaggatggatatatatctattgaagcagaacattatacccgttcagcaaatggtacatctgctgattgggttacgatccctaacctgggacgtaccttgtcagccgtcactactttgccttccacagctactccgagcgaagatatgtatctggaatatgattttgaaacggagaagagtgatgaagcaacagttatggtacgtttctcttcgacattgaatttcaatgattataaaggactgcgatatgcgatttcactggatggcggtgacgaacagatagtcaacatcaacggtgattataaaggtgaacttggcagattgcaggcggagcacatcatcactacccaaacgaaacatttgcttgataagaaagaaaagcataccttgcgcatccgtccgcttgacccggcacttgtcatgcagaagataatgattgacttcggaggtttgaaaccttctttcctgggagcgccggagagttctgtgagaagggaatgtttttaaggaactcccataactcctaaaaaaaagattatgaaatacagatttgctttattgatagtactggcctgcatttgttctgtgttggctgaggctaaagtgaaactcccatccgttctttcggatgggatggtattgcaacgtgaacgtcccataaaaatatggggaacggctgatccgggtgagaatgtggttgtcacgttcaagaagaagaaatacacggcagtagccgatgaaaatggcaaatggctggtaacacttcctgcaatgaaggccggtggcccttatgagctgacagtgaacgaaatgacagtgaaggatatcctgataggagatgtatggttgtgctcgggacaatcgaatatggaactgacggtggcgcgtgtagcggatatgttcggtagagagactgctacttacgagaattcaatggtccgctatgtcaagactccctatggtaatgatttgcatggtcccaaagaagacatatcccaaatgaactggacagcgttgaatccgcaggttgcccagtcttatgccgcattgccttacttttttgcaatagagatgtataatgagacgaaagttcctgtcggcattatcaattccagttggggaggaagttccattgaagcttggatgagtgaagatgcgcttcaggcatttccgaagaacctgcgcgagcgggatatctataactccgacgaatacaaggccttgatgaataaagcgggaggaatgatgtcgagattctggagcctctctttatataaaggtgatgaaggccttcatgctccggttaaatggtatgaaccggaattgaatgatttcgactgggaggaggtgaatatgttttcttatcagttgggcagcaaggatggttatccggtaagcggatcgcactggttccggcagaacattcgccttacagccgagcaggctgataaagatgccatattgcgtttaggctgtatggtaaatgcggactctgtgtatgtgaatggtgtttttgtaggcactacttcctatcaatatccgccgcgcatttataaagttcctgcatcggtgttgaaagcgggagagaatctggttacggtacgtcttattaattccggtggtcgtcccagttttgtaaaaggtaaaccctattgcatggcgatagatggggatacggttcgcttgtccgagcagtggaagtataggctgggttgtgaaatgcctgccggaagaggaggtgtatcttttcagaacattccgaccggtatgtataattccatgatttctcctttgcggaatcttacttttaagggagctttgtggtatcaaggtgaatcgaatgcaggacgtccaggtgaatatgaagctttattgactgccatgctcaaagactggcgggtgaaatttgcagatgaagacttgccattctttataatgcagctacccaattttatgcagacgcatcagcagcctgtagaaagtggttgggcaggtatgcgtgaagcacagcggcaggtgacgttgaagttgcctaatacctctttggttgtggcaatagacttaggagagtggaatgatattcatccgctgaataagaaggaactggcaaggagagtggcgcttcaggtcaagaagaaagtatacgggcacaaagatatagttcatagtggtccgctgtgcactgccgccgctattgagggaggaaaggtcattctatcttttgaggcgggaacggatgatttaatgcctgtagctcaacttaaaggttttgcattggcgggaacggacggacgttataaatgggctgaggcgaccgtggaaggcaataaagtggtggtctggagtgaagggattgctcagcccacaaaagttcgctatgcttgggatgataatccgcaggaggccaatttgaagaataaggcgggacttccggcttcgccgtttcaaatggatgttccatgattccctaaacttgattgactaagaaacaccggaatttatgcgcccggtgcaatgtgacaataagatagtgaaacagatgtatttcgttgcaatacatctgttttttattattattaataacaaaggtcccaatcagaaagttgcttccagaaggataaaacaaggttttatctgattcatttcatctattgttatgctacagatggtctattgtgctccattacatgatctattctaatcaatcagatcatctattctccctaaacggatgatataatttgagaaatggctacaccttttgccccataaggctacaccatccttaccaaaaggtgacaccatcacccaaaaagggtgtagctcttctgaaaaacaggtaatattcttctatttcaaagaagataagtggcggaatcaaataatcatatttgaagaaaatacgatcaaagcgcaattaataagaacgaaataagaaggaatctctttctaaaatgcgcttccttttaccattacaaatcatactgcattcgcctaacaggtaatccttgctttttttgtatcacggcaactaatggtacgaaagaaagcaacctcagacatcacgatttacattttgtcatattgctcatttcgctcaagctgttcattttgctcaaattacgtaagtagcctgaaaggtttttcctttactctatctttatctgtcagcatatttcttttgccatataacccctccattctcaaggacctctttccttgcatagtgagtctaatcaagtgcactttcttctactatttctttcgcttgtttatattcatttccgaaagatatgcccattccctgtctgatcttgatagaaaataatcaaaaaggcttaaaaatgttaatggatatattgctgcaataaatgaatgaaagtcattttttagctttaacaagtgggttacatattttttgtgatacgttaccacgctgttttttcttgcatttcttttgcaattttgggttcattattatactgtttttctctctctaaagtgatttcttaagctctcttttatacctaaaaaaaaatcttggtaagttctgtaattggttgatttgtagcttgatatattgttttgcgaaatgcgatcaaaaaagaatgtaacatcgaagagaaagatgtaatgccatcaaaaaaacgtgtagcatgatcgtgtccactgttttatttctgatgcatacatttgctgctgtgaaaaagtacgctataatgtttggagagatatgtatgaaaaacacttttctttcctcctatggtatgaaaaactaatatatgtaataataacaatatgaatattaaccttcaaattattaatcttaaaagactaattaattatgaaatgcaagtatgatgacagttaaagctatttataatagctaatgtaatgaagagaatgtagttattaatatcttaaactaagggtaatgaaaaatgtaacaaaacaaattaaaaagatccattacttgattcttttgttgctattgagttgtttaccgactttagcacagaatggagtaacggtaaaaggaacggtcgtcgatggaaatggtgaaactgtaattggagcttccgttgttgtaaaaaataataattcaataggtacgatatcagatatagatggaaatttcacgttggttgttcctaatgacaaagtaactcttgtggtctcatttatcggaatgaaatcgcaggaagttaaaattgctggtcaaaagactttgaagatcactttagaagatgactcacaacaattggaagaagttgtagtagtaggatatggtcagcagaaaaaggccagtgtagtaggtgctatcacacaaacttctgctaaagtattggaacgtgctggtggtgtttctgacctagggtcggcactgactggtaacttgccaggtgttattactactgcctctacgggtatgccgggtgaggaagatccacaaattgtgattcgtggtgccagttcttggaacaacagttctccgttgattttagtcgatggtatcgagcgtcctatgtcaggtattgatgtgaattccgtagagtctatttctgtattgaaggatgcctccgccactgccgtttacggtgtaaagggtgctaatggtgttattttgattactaccaagcgtggtaaggagggaaaggctaccattaatgttagtggtagtatggcattgaagatgccgtctaaattgcccaataagttggattcatacgatgcatttcagttgcgtaacaatgcagtagagtatgaattgggattggcttctgattcttggatgtatatgatgccacaagcggaaattgataaatatcgccaccctgctaatcaagctgaggcggaacgctatccgaacattgactgggcagattggatgttcaaggatcatgccttctccgagaatgctaacgttagtgttagtggtggtacccgtttcgtgaagtattatgcctccatcgactatcaacatgagggtgacttgttcaaggagtatgataacggtcgtggttatcagaccacttacggttacaaccgtgtgaatatgcgtagtaatcttgattttcagttaaccaagaccaccttgctgaagactaatcttgccggttcgcacggtgtaaagcaaggaccacgtactgcgtatgaatataatatctggggtagtgcttatagtactcctcctaacgtgttctatccgaaatattcggatggcacttggggatatgacccgattaataatgccaataactctgtagctggtttggctttggccggacagaatactcgtactacgacccgtctgaccactgactttacattggagcagaaactggatttcgtgttgaaaggtttgagtgctcgtgcttctatttcttgggataacgtgttttttgagcagaaccgaggtgtaaactccactgatggtgctttatataagtatattaatcctaataccggtgctgtcagctataatcccagtcaaggtagccataacttcgatttccacgaacagattaactgggttccagaaggtggttctattgataacggtgctacggaacgtcacctctattactcagcacagatagattacaacaatacctttggtaaacatactgtgggtgctatggggttgttcagccgtcaggaacgtgctcgtggtagtattgttcctaactatcgtgaagactgggctttccgtgttacttataactatgccaacaagtatttcttggaatacaatggagcatataacggttccgataagttcagtgctgataatcgttttgtattcttcaattctggtgctcttggctggatgattagtgaagagaagttcatgaagaaaatcaagttccttgatatgttgaaacttagagcttcttatggcgaaattggtaacgacgtgattggtaacgaatgggatacttctcgtcgttggctgtatatggatcaatgggctacaggtggaaatatcaagactggtttgtataatgtaaccagcccttatactttctatagtcaatcaacagtaggtaatatggatatccactgggaggttgtccgtaagtttaattttggtatcgactactctttctttgatggcctattagctggtaatgttgaaatctttagagataagcgtacagacatattgattagtggttctgatcgtgcaatgccttcttattttggtggtacggtagcagctccatgggtaaacttgggtgaagtgaagaaccgtggctatgagttggaactccgtgtgaacaagaccttgaaaaacggcttgcacctgtggactaatttgaatatgactcatgccgtgaacgaagtcattgaggctgatgatccggaactgctgcctgcttatcaaaaggatgctggaaagcaaattggtcagactcatacgtatgtagatcatggctatacacaaacaatggacgatgtgtatggtagtaccgcttttgaatcgaatgataaccaaaagttgccgggtacttattacatcctcgactataatggtgatggtgtcatcaactcctacgaccagattccttacggatattccggtagtccgcagaatacatatagtgcttcgctcggttttgactataagggctggagtttcttcgttcagttctatggcgtcaacaacgtgacccgtcaggtggtcttttctacttttggccagaaacaactgattgcttacgacgaaggttcccgctggacaaagtataatataaatccggatgtaccaatgccacgttttggttcaaccactaacggttactatgatgcagctcgctacttttacgatggttcttacgtccgcttgaagaatattgagttggcttatacttttacggatggttggatcaaatcgttgggactttccaacttgaaactttatgtcaatggtaataatctttgggtatggactcgtatgcctgatgaccgtgaagctaacttcgccggtacaggttgggcttcgcagggtgcttatccgacagtgaaacgtattaacttcggtttaaaattcacattataaaaaatagtcacatgaaaagaacatatatacgtacattattctatggcggattgctttcgctatgttgtttggggatgacctcttgtgaggactacctggacaaggcacccgagagtagcgtaaatcccaatgatgctttcaagaacttccgtaatttccagggcttcactgaagaattgtattattgtattcctgactttgctcatggttattggaacaactctttcaactggggggaggatgagattttttcttttagcatcgactatcacatggggtataagatagatatgggtgacttttggggatggcagtctggttatgacggttggcagagtggttggatggaccgcagcaatacaaaggctaattcgactgaccgtttccaaaaatctctttggcctttggcttggtatggtattcgtaaggctaatttaggtttggagaatatggataagttagtggaagcaaccgatgaacaacgcaacctgattatgggacagctctacttcttccgcgcttggtttcactttgaactgatgcaatactttggtggtttgccttatattgactctgtaccttcctcttccgagcctttgcgcaatccgcgcttgagttatcaggagtgtgctgatcttgcagctgccgacttccgtcgcgctgccgacttattgcctgttgattgggataatactactaccggcaagcctacctttggtaacaaccagcagcgtatcaataaaattatggcgttggggtatctgggtaagaactatttgtgggcagggagtccgttaatgaactacgcaactaatggcagcaaaacttataatgccgactattgtaagaaggcggccgaagcgtttgctgaattgttgaagttggtagatgctggtcagacccaatatgatttggttgattttgctcactattcggatattttctattcattcaagcagaattctaagaatcccggttctaccgaagctatcttccagacgccgatgtatgactggtggatggggtcaggctggagtttaggacctcagtttgttccttctatattggctaatgaaaccaatggtgtggtattctgtccgacagctaactatgtaaattattatggtatggccaacggtcttcctctgaaggatccggattctggttttgatgaagaatatccgtggcgtgatcgtgatcctcgtttctatactgacattacttatgatggattgcaggtaattgaaaacactgctaagttcacttctgaacaaaaagaaaaagaaattcagtatgctaacctttatacaggcggtaattaccgtgatataaagaatgagagccgtacaggctatttgttgcacaagtatactccgcttgtagtgaacggctttgatgagggtcttcgtgactatggcgatgcattgactatccaagttagttggatgcgtctgtctgatatctacttgatgtatgctgagtctgttgccaatggttacggtagcccaacatcagttgtcaacggttactctttgacagcccttgatgctgtcaataagattcgtaatcgtgccggcgtagaagacgtagctgataaatatgccggttcattggatggtttcatgagtgaattgagacgcgaacgcgctgtggagttggcttatgaaggacatcgtttcaatgacttacgccgttggttattgttaaccgaatctccttatactatcaagacctcgcaagaatttgatcgcgtagaattggataagaaagatccgactcagagccgtgtggctaatttcagagaagaagtcattgtgactcggaatttctccgagaagcattattggatgcctctgaaggtttccgatgtgaatatctatccggagttgtatcaaaacccgggttggtaatggtcttgagaaacttgaacgctaaaattaaaaaggaattaaaatgaaaagcatacgaataaagtccgttttatgtgtggcacttgcagcttcttccttgtgtgcaggcgctcagaatgtgttgtcggattttccggtagccgattctgattcgctgaatttggcatcggaggaaacggtacaggtggcctatagaaaggttaataagaacgacctgttgggaggagtctcctctgtcaatgtagaggaactcttgaagaaaaataactttacttacagcttagacaatatgcagagcatggtgaatggctggaatggtaacagtctttggggaatggattcctacctagtactggtggacggggtacctcgcgacgctaataacgtgatgccttctgaaatcaaggatatcacttttttgaaaggtgcctctgctgtggtgctttatggtagccgtgccgctaaaggtgtaatttatataactactaagcgtggtcaagtaggtgatactcgcgttgatgtacgcgctaatacggggtttcatgtgcccatcagttatcccaagtatttgggtgctgctgaatatatgacactttacaatgaggctcgtgttaacgatggcatggatccgctgtatagtgcgaccgatatctataatcatggttccggtataaatccctatcgttatcctgatgtaaatctttactcggatgagtatttgaaaaagtcatataacgagtcggatgtgacagctgaaatttctggtggctccgagaaggcacgtttctacactaacgttaacctttataatattggttcgttggtgaaagtaggtgaggccaaaaaagaccgtactactcgtttcagcgtacgcggtaatatcgatgtagatctgggaaaatatgtgaaaacttacgtcaatgctaatgccactttctatgatggtcgtggtgcacgggggagtttctggaatgcagccgctacgttacgtcccaatcgtatttctccgttaatccccattgattatgtgatgcagaacaataccgatgcatggaatctgattaataatagtagtcacttgattgatggtaaatatttgttgggaggtacacaagtagatcagaccaatgaaatagctaacctttatgcagctggtgtcaatacctacaccagccgtcagtatcagtttgacatgggcgtagatattgacctctctatggtactgaaaggactttcgtttcagacacgttatgccattgactatgctacgacctacaaccgttattacaacgatacgtatgctacatacgaaccgcagtgggcgaatgtcaatggtgtggaccaaattgtaggtctgaccaagtatggtgatgacgtacatgatggtattcagaatattaatgatagctggaatcgccagaccatggcattctcagcccagcttaactatcagacgaaggtggctgatgcacataatatttcagctatgctgattgctgctggttatcagcaaggtgaaagtgccgtttaccacaagaccagcaacgtcaacttaggcttgcaagtagattacgattacttaaacaagtattatttgagttttgggggggccttggttcactccgcgcgtctacccgaaggtaagcgcaatgccttttcgccttcgctcactttgggttggcgtttgagtaaggaaagttttcttgaagactcctcaattttggatgacctgatgttgactgcttccggatctattctgaataccgatttgggcattgatagttattatatgtatcagactacttacgaccaagcaaacggtgcttggtggggatgggctgacggtaaccagagtcatgccactgaggcaagacgcggtagtaatactgacctttcttttatccaacgcaaggaaatcagtgtaggtctgcgtggatcgttgtggaaaaagcttttgaggtttgatgcttcattctttaagaacagccttgaaggtatgctggtacagccatccaatagtttcccgaattatttcgtgtcttattggccagaaagtactttactaccttatgtgaactacaacaacagcactcgtaccggttttgaccttgcattgaacttcaacaagaaggtgcaggatgtggatataaacttaggtgtgaacgctatgtattatactaacgagaacactaaagtggacgaattgtatgaagatcaataccgttatcgtaaagggacacctactgatggtatctgggggctgcaaactgacggtttttacaccagcgaggaggaaatattgaactcgggtatcacttcttcttacaacggtgagttgaaaccgggtgatttgaaatatattgaccaaaatggtgataatattatcgatgagaaggatgaagtttacttgggtgaacgctatggttggcaaggctctccgttaactttaggtctgaatctgacgctgaagtggaagaatttcactctgtttgcgcagggtaccggttactttggtggttcagcctttgcaagtggcgactattattgggtatttggtgacaagaagtattcggaagtagtgcgcgggcgttggacacccgaaacatctgctactgctacttatccgcgtctgacgactcagactgacaaccacaactaccgcaactcggatttctggttgtatagcactaaccaatttaaactttctcgtttgcagttgacttacgacttacctcagcaatggttgcgtggttcatttgtacacagtttgtcagtatatgcctatgcaagtaatctgttgaccatttcgaaagagcgtgaaaaattggaactgaatacgggaacgactcctcagagccgttattacaacatcggtttcaagataggtttctaataagtgacacaataaaagtagattcttatgaaaaaaataatgacagtttttgtcgctgctcttttgctggtgggatgcgatgacttatttacaccagccatagaaaacaacaagcaagtatcagatggactcaatgacccgttgtatgcggagggaatcttagcgaatgcttatacccgaaatccatacaattcgcagtcgttcaacgatgtggctactgatgatgctgtaactaaccaaacgagtaacagttacttgaagatggcgactggttcgtggacatccaacagtaacccgatggatcaatggagctcttgcaaggctgctattcactacattaatcttttcttgagtcaagtagatcaagtgtcttgggtgaatacgccgattgtgaacacaatgttctgtgatcgtttgaaaggcgaagcttatggactgcgtgccatgtttaatttctatatgttacaggcgcatgccggatggacagctgatggccgactgatgggtgtacctattgtagaggaagtggaaactgaggcttccgatttcaactatcctcgtaatacgttcgatgaatgtattcaagctatatataaagatgtgcaaagagcaaaagagttgttaccactcgattacgaaaatatttcttcggatgcacaagtgccggaaaaatatcgtaatgagggtgctaactatagtcaatataacgtagtgtttggttcaaactttcgttctcgtatgagtgcacgtattgcattggctttccgtgccaaagctgccttattggcagccagccctgcttttgctgaaggtagcaatggttcttgggcagatgctgctgactataacggtgagttattagatatgattggtggtgcttccggtttggctactcagggtaatacttggtataagaatgctgatgaaatcaacaatcttactggtggttccaatccgcctgagatgatttggagaaacggtaaagatgctacggcttatgcgttggaacaggctcagttcccgcccagtctttatggtagtgggcaaatcaatccgacgcagaacttggtagatgctttccctatggcaaacggttatcctattacggatgctccggaatatgacgaacagaatccgtatgctaaccgtgacccccgtttggcgttgtatatcgtagtcaatggtacagagatgggtactgataaaaagattattgatactagtgccgacaatacatctaacaatgacggtttgaaccgtgaaaatggttattctacgcgtactggttactatttgcgtaaacatttgcgtgaggatgtatatttgagctcaaccactacgaccggtcagcctcactacagcccgcgtattcgctacacagaaattttcctgaattatgcggaagcagccaacgaggcttggggacctacgggtatgggaacgcatggctattcggcttatgatgtcataaaggctatccgtaaacgtgctaatgtaggtaccgataatggtgatgcttatttggaaagcgtgaaggataatcaggccaaaatgcgcgaattgattcgtaatgaacgccgtttggaactttgcttcgaaggttttcgtttctgggacttacgccgttggaatatggatttgactgagcctgccaagggcatacgtatcaatggtgaaacgtatcaggtatttaatgtagaaaatcgtacctacagtgactttatgcggtttggtccgataccttatagtgaagttgtgaaattcgatgctttggaacaaaatcaaggctggtaattggatttgttgaataacttttaaagattgaagaaatgaaaaaattattttatctgttttcattgattatgttgcttgctttctcttcgtgtgaaaaccaagattggtctttccccgattatggaagaactaccgtatactttgcttatcaatatccggttcgtaccatcgtattgggtaatgatgaaatatttgataatacgctcgacaatcagcacaaatgtcttataaaggctgtgatggggggagtgtacgacaatggtaccacacctacagtggacattgacgtggtaaattcattatgtgacaacttgactttcgcaacaggtggtcaggtagtgccgatgccttctaattattacacgttggcttctgatcagattgtgattccgaaaggccagattagtgccggtgtcgaagtgcaactgacggatgctttcttcgcagatcccaaatctattgaaacaacgtatgttattcctttggtaatgtcgaatgtgcagaatgctgactctatcctatcaggaaacccgatggtcgagaatccggttcgttgcaacaagggagattggaatgtggttccgaaagattatatcttgtatgctgtgaaatacattaatccgtgggatgctgtttatctgcgccgtggtgtggaccaagtgacagagggtggaacaacttctaaagtgattcgtcacgaacaatatgtagagaacgatgaggtttgcgaactgaccactcgttcgttgaaggatgccaactttggtttgacgctcagcggtcaggattgcaatctgattcttgctttcaatgataacaatgaatgtacactttctacagacacaccgggctgcacggtttcgggtactggtaagtatgtagtaaagggtgagaaggactcgtttaatcataaggatcgtgatgtgctctacttggactatacggtagacttgggtacggtcacttatgctactaaggatactttggtgatgcgcgatcgtcaagtaaaagctgaatggtttgatgttgcgtataataaataattttaaaacaaagagaatatgaaacaatatatgaaactgctttcggttttggccttgggcttggcaatggggtcgtgtgtagacgatgccatactgccttactcggtggagaaaccggaagacgtagctcaatatgagtatctgaaagattataatgtattgaaatcttatattgatcgtagccagcatcccaacttcaagttgggattggcagcggcggtcagtgattttgtcaagcacggtgtagtgtacgaaactgtaacaactaacttcgatgaaatgacagctggcaatgccatgaaatatgcttcgatagtaggtgatgatggtactatgaatttctctacggtatctagttttgtggatgaagctaaagctgccggtattactatttatggacatacattagcttggcatgcacaacaaaatctgacgtatctgaatggattgattgctgacaaggaaatcgaagttaatccgagtgataaggaagaaaagcaggatgcgtatgtagactattctacgtttacaagctatcctttctatgttatgggatacgagcctgtctttgagaatggttgcttagttagccgttatcccggagaatggtatcagtatttcgtagcagatcagattcctactacgattggccagacttataagctaacagcttatattaaaggttccgctcctggtactctcaatgctcagtttggtaattggggtgcattagtggatcggcctttatcgttcaacgaagattggcaagaggttagtgtggaatttgacaattgtcaagtcgaatctagttttatagtattccaaccaggaacgtttgaaggagatattaatattaagtggttgaaagtaactcattcagaaactcctaccgttgagatttatacagatgttcttgaaaatggagagatggtggtaggtaaaccaatgaataactttattgtccgtgaacatggaaaagctgatgttcctggtactattcttgaaggtcaaggtcctgatggtaagaactgtataagcattacttctatttctgcagcggaaaatactcatgatactcagttctttattacttccgataaggtttgggaagctggagagcaatataggatatcattttggtataaagccacagctgaggcaccctgtgaaacacaatgtcatacaactccaggctcatattttcattgggctatgttacccgcaaatcctacgtttacaactgaatggaagcattatgaaacaataagtacaattccagcagaagcagcaggcaagggcatgcaaaccatagcttttaatcttaatgcggacaaagaaaatggacatacatattattttgctgacatccattgggagacagtagagaaaggtaataccattcctcttactcctgaagagaagaaggacactttgacatgggctatgaataattgggttgaaggtatgatgaaagctactggcggttatgtaactgcttgggatgtagtgaatgaagctatttccggtggtggtgataacggtgaaggcttctatcctttgcagtcagcttccaatgttagtgcagatgatgccaataataatttctattggcaagactatttgggtaatgaagattatgttcgtatagtggtagctgctgctcgcaagtactatgctgataatggcggtactgagccgttgaagctctttatcaatgattataatttggaatcatggtgggatggcaataagaaagcacagagtttggtacactggattgagaaatgggaggctgatggcgtaactaagattgatggtattggtacacagatgcatgtaagttatatcctgaatgaaagtgaccaaaaagctcaggaagacgctattgttaagatgttccaaatattggcggagagcggtaagttgattaagatttctgagttggatatgggtgttgtagaaaaagctttcggtacaggtttgaagacggaagatattacttatgagcaacatctcaaaatggcggaattctatcgcttcataatatcgaagtatttcgaaataattcctgctgcccagcagtatggtatcactcagtggtgtgcaactgatgctccaagtgattcaggttggcgcggtggtgaacccgtaggtttatgggattctaattacaatcgtaagcatacttatgcaggttttgctgatggtttggctggaaaataatagaggtttataagaaaaggcagcggggcgtaatgttaaccgctgcctttattgttttaataaaaatcgaataacaatgaaaaacacattatttattttgagtttaattatttggtgcagctgtagtagtgaaattccatttgatgcagatagagcagaagatatagttgctacaaggactgcaaatttagatgaatattcgtttgaaatttatgacggagcattgtcgtcttactaccaatatgattgtaagggtaatttggaaaaagttatgtctgccatagtttcatttcataggggtaataatcatataacgatttctgtgagagaactttacctaaactatcctatatttactgctaccacaacttattccgtaaaaagagatatcagttgcgacattccacataaaatatataatgatgggggagaaatgaatctaaccgcatctataacaattcgcaaaggagaaacaaaaaggacttatgaaacggattacaatggttctccgttagtttagttttgttcgttattggtaatattataataaacaggactgtttggactttcaattaaagatgtaacatcagtgaataattgtgtaacataaagatacagattatttcattgctatctgttacatttgaaacggaaaaaagaagtagacaagaggacaagttgacaagaggaataaggggcagcgcaatgcttctatgccgcatggagccttttcaacttgttcccttgtttactactgatttaaattcctaaaataatgaagaatgatatgaaaaaaataatttatttgttgacattgacattaggaatgtctttggcggcttgttcggacgacactattcctgtgcagccggagaagccagaaccggagaaacctgttgaaccggatccggaacctgagactcctgctggagccaagttgccggtattgcgtgtagaagggcgttatcttaaaaatgaaaagggagaaattatcaatctgcatggttttacgcagacttacagccctttcttcaataataatgcgtggggtaactatgatgtgcaggcatgcctcaggtataataagagcatggtagacggcattgtggccgcaggatggaaattcaatttcgtgcggatgcacctcgacccgtattggagtgatgacccctccatgcagtccgtgagatatgaaggacatgaacggttctctgaaacccgctttcggaagtatcttgaagagttgtttgtgccgatggcagaatactttatttctaagggaatgtatgtggtgatgcgtccgcctggggtttgtccgtctgatgctccctatcaaggtatagaaataggagacacttatcagcaatttttgctcaaagtgtgggatattgtctcgcaacatcctaaactgaaaaataatatggatgttatgtttgagcttgctaatgaacctgtcagaataaaaggtactgacggaacatacggcagtagcggtgacggtcatttcaagaatctccaactctactttcaggctatagtagacaagatacgtactaattgtcacaacattgtttgggtgccgggattgtcttatcagtcatcctacgccggatatgctattcaccgtatcgaaggagagaacataggctttgctgttcactgctatcccggttggtatggtagcgatgctgaggaagacagcggcgaaggaatcggctcttccacaggaggtggttatgaagcttttcagcggggttgggatgcgcaagtaggtcctgtagtagctttcgctcctatcatggtgactgagatagactgggctccgaagaaatatgatgccacttggggtaaaagtattacaggaacggcaggtgctgaaggctttggcgccaattttaaatatatagctgataattcaggtaatgtttcttggttgtttttcaccactagatcccatgaactggcggcatttaaggatgtgccgggtgaaccgggcaactatacttttctcaatgaccccgaagcctgtccttgggcgatgtaccattggttcaaagaatatgctgatgggatagtagtgaatggggaattggagaaactggagttgatgggacaggaaggaaatcttcgtctgcaaatgggtggtacgaattatctcaaagtgaaagctgtttattctgatggaacggtacggatggtgactgcggaagcgactgtcaacagttcagatacgaacgtgctgaaagtagaacaggcagccaaattagtagctgtggcaccaggtgaagctacggtaaccgttacatatcaatcggctgccggagtcagtaagcaactgacattgcaggttacggtaatttctcctttctcattgacggcagatgtcttcaatccttctatatgggagaaaggaacatttgacgagagcacccgcacactggtgacgggacagtatggtttcggagggtggcaatatgacagtggacttgatttgtcgggatataagactgtgaccgtagaattgggtaatgataatgaaagtggtgtttctttccgtctgtttgataaaaacaattattggagtgagcctgctacgtatgatttcggatcttcgcgtaagattgtagtggagttgaacaatatgaaagataagaatggaggaaagattgatccttcgcatctttacattgcaggcttttggtcaacaggtggaaaacctattgtgatagctaatgtctccttagcaaattaaaaagacatatcaactctcatctttccgagagtttgatataatttgtgcattttataatatctttcctgcatactctgtgaagagtatgcaggaacacaaatctgtaatatttatctaatattgatatttaaatgtctaagattgtaaagcggtgatcagattcatgccttatttttgcagatatgaatagtttgaaaaactttaaataaaagatatgatgaagaagataattgtatggttggctgtaatgatgtatatattgtccggttatgcacaaaatgcaccttggaattttcagagtaaagtagtcacggatactcttttcagtaaagtgttaaattcaaagcgtgcttataccgtttttctgccaaagagttttgaacagaataaagagaaaaaatatccggtcctgtatcttttgcatggtatgtgggagaccaatcctgtctgggccgagcgtggacatgtaaaagatgtgatggatcgccttgtagccagtggagaagcatgtgagatgattattgttactccgaatgccggtggcaatatacacatggcatggaacggatattttgatatgccgggttggaaatatgagactttcttttatacggaatttttgccctatatagagaaaaaatacagggtgataggcgataggcagcatcgtgccattgccggattgtcgatgggaggtggcggagctactaattatggccagcgccatagtgatatgttttgtgcagtctatgcgatgagtgctctgatgtctattcctgagcagggagcagtatctgctgatgatccgaattctaaaatagcgatactgactcgtagtgttattgaaaatagctgtgtgaaatatgtgaccgaggccgatgagaaccgtaaggctgatttacgtaatgttgcctggtttgtggattgtggggatgatgatttcctgcttgatcgtaatatagagttctatcaagcaatgcgtaatgccggtataccttgccagttcagggtgcgcgatggaggacatgattgggaatattggcactcggctctttatcagtgtttacctttcgtaacccggatatttggtaaggaatgaatatacatataaacaaacaataatagacagattatgagaacatttgtattcacatgcttgcttcttttaggcatgacgacatttgcacaggacgcgaatttccatatctatctgtgtttgggacaatcgaacatggaaggaaatgcaaaggtagaagaacaggatacagtggcagttgacagtcgctttcaggtattagcggctgtcgattgtcctaatttggggaggaccaaagggaattggtataaggcggttcctcctttggctcgttgctatacgggcttgaccccgggagattatttcggtcgggctatggtggctaatcttccatctaatgtgcgggtaggaattatcaatgttgccgtaggcggttgtaggatagaactgtttgacaaggataactatcaatcctatgtagaaacttctccggactggctgaagaatatggtaaaggaatatggcggcaatccttatgcgcgtttggttgagatggcaaagcttgctcaaaaagacggagtgattaaaggtattctgttacatcagggagagtcgaatacaaatgataaagactggcccttaaaagtaaagggagtgtatgataatcttttgaacgatttaggattatctgccgctaatgtgcctttgttggcgggtgaggtggtacatgcagatcagaatggcgtttgtgccagcatgaatacaatcatcgacagtttgccacaggtgattcctactgcacacgtgatatcttctgccggttgtccggctgcattcgataatcttcattttacagctgaaggatatcgaatgttaggagctcgctatgctgctaaaatgctttctattttaggatatggagattggacgtctgctcagaatatgaagttatggtataatcgtccggcacaagattggttggaagctttgccattaggtaattcccgtttgggggctatggtatttggcggaactgcccgtgaagaattgcaactcaatgaagagacgttctgggctggtggaccgtacaataataataatcctaaagggttgcaggtattgcctgaaatacgtcgccttatttttgaaggcaaaactttggaggcgcagaaactcattgatgagaattatatgacgcctcagcatggtatgcgttatttgacgctggggagtcttttcctgaatttccccgggcatgaaaatccttctgaatattatcgggatctgaatctggagaatgctactgctacaacacgttatgaagtggatggagtgaagtttgtccgtacggcatttgcctctttgagtgatgatgtgattattgtacgtattcagtcggataaggcaaaggccttgaattttgccgtatcatacagcagtccgctgaaatcagatgtacaagtagaggggagcaagttgattatctcttgtcagggagctgaacatgaaggaattcctgctgctatgcgtgccgaatgtcaagtacaggtgaaaacagatggtaaagtgagtaaggaagaaagcgcgcttgctgtgaatggggctactgaagctaccttgtacatttcagcagctactaattttgtgaattatcatgatgtcagtgcgaacgagtcaaaacgtgcagctacttatttgcagaaagccactcgcattccttacgaacaggctttgaagagtcatatcgcctcttatcgcaagcaatatgaccgtgtgtccttgactttagaaagtaccggagtttccgctttggagacacctgtccgtgtgcaacgttttatggaagggaatgatatggcgatggcagctttgatgttccaatatggtcgttatctgctgatttcttcttcgcaacccggtggtcagcctgccaatcttcaaggtatttggaatcatagtccatatgctccctgggatagtaaatatacgattaatatcaatgcggagatgaattattggcctgctgaagtgaccaatttgagtgagacacatgaacctctctttgatatggtgactgacttggcagttacaggcagtgagactgctaaagttctttatgatgctaaaggttgggtggcacatcataatacggatatatggcgtgcctgcggaccggtggatgctgcatacttcggcatgtggcctaatggaggtgcctggctggcacagcatctgtggcagcattatctgtttaccggtgataaagagtttctaaagaagtattatccgctgttgaagggaactgctgatttttatttaagtcatttagtggaacatccgaagtataaatggatggttacagtaccttccatgtctcctgaacatggttatcggggttcacaaacaacgattacggcaggttgtacaatggataatcagattgcttttgatgctttgtacagtacacttcaggctagtcgtatcttgggtggagataaacagtatgaggattctttgcaggtaatgctgagtaagttgccgccaatgcagattgggaaacataaccaattgcaggaatggttaatcgatgctgataatccgctggatgaccatcggcatatttcgcacttgtatggcttatatcccagtaatcagatttctccgactacaaatccagagttatttcaagctgcccggaatactttgatacagcgtggagatatggctaccggttggagcattgggtggaagattaatttctgggcgcgtatgttggatggcaatcatgcttataagattatacagaatatgcttcatcttttgcctaatgataaagttcagaaagaatatcctgagggacgtacttatcctaatttatttgatgcccatccacctttccagatcgatggaaactttggttatacggcaggagttgcagagatgttgttgcaaagccatgatggtgcagtacacttattgcctgcactgcctgaagcatggaaaaaaggaagtgtgaaaggccttgttgcccgtggtggttttgtggtggatatggaatgggatggcgttcaactgaaaaaggcgaagatacattctcgtttgggcggggtactacgtatccgttcttatgttcctttaaagggaaaaggagtgaaagtggcagacggtgcttgcccgaatcctctttatgcatcggcagttataaaagaaccggtagtttcaaaactgataaatcctcaggtaccggtcctttatcgtacttacgaatatgacattgttactcagccgggagaagactattcgctggagcgtagtatgtaatgatattagcaatctattaattgtgataaaaccttggagtgatgaaacttaccactttatttgcggttagtgtcagcctgatactttccggtttttgttcacttggagttcaggctcatcctgttcaggaaaacagtagtggggacccggttcctgcaggagcttactatactgataactataggaatttgtttaatgagtatttaggtatttctcaacaacaaaccgaccggaaaatagagcaaatctggaatcatttctttgtgaatgaaaaaacaaaggtttactatgagagtgatgacaatactgcttatatttatgatacagggaatcaggatgtacgtacagaaggaatgtcctatggaatgatgatatgtgtacagttggataagcaggcggaattcgataagttatggcggtgggccaagaaatacatgctatatacttcgggcaaatggtcgggatattatgcctggcactgtacacctcatggtgttaaaataggtaaggagccgagttgcgcttctgatggtgaaatttattttataacttctttattctttgcttctcaccgttgggggaatggcggagcatatgactataatcaggaagctcagaaaatcttgaaagatgttatgtctaaagatggttcccaaggcgtttataacctgttcaatactgagagtaaactcgttacatttgtaccggaaaaggtctattataactatacggacccttcttataatctgcctgctttctttgaactttgggctttgtggtctgacactaataaggaattctggaagcaaacgcctgatgcagcccgtcgcttgttggctgatgcatcgcataaaaagacgggattgtttcctgattattctgcattcgatggcactccttggaaacctaagaattgggggtatgatacaagaagataccagtttgatgctctccgttgtgccatgaatgttggtatggattattattggtttgggaaagatgctgctaaccagacagagatgatgagtcgattgcttaactttttcaagcaagataattttacgcacgaatattttaatgtggatggttcagcacctgccggtaattattcaacaggtatgatcggtgcaaatgctgtaggagcctttgctctgaatgacaaggatctggcgaaagaatgtatacagaaattgtgggatgaaccattacctacggggaaattccgttattatagcggtatggtatatatgatgtctatgctgcatgtcagtggaaacttccggattatcaagtagtttggtgaatggaaagtgtaaaagtagtataagcgtaatatattgctataatagagaaagccagctaattgtcatgaattagttggctttctttttgttctgtttagttctgttgctcaatcttgtcaccgtcagaaaaagaagacttttgctgttcttccatataggaggtgggtggcactccgtataattctttaaaagcggtagaaaaatatgcaatattagtaaaacctgtaaggctagcgacttcagtaatgttatgatattggtttgctaataatgatgccgcttgtttcagacgaacattgcgtattaagtcgcgggttgactggttagttagctcttttagcttacggtgcaaatgtacgcgactgatacctacttcagttgctatcatttcaacattcaagtcaggattaccgagattgtcattaataactttcatcactttattaagcagcctgtcgtcaggtgattggacttttagtttcttcaacttctgttcttgcatctgactaccgctgaaactattgcgcaatacttctctgctcttgatgaggttgatagctgtttttctcaatatttcgatactgaatggtttcactatatatgcatctgctcccatgtttaaaccttccaggttatcttcttctcttgatttggccgtcaagagtataattggtatatggttgatggttacgttctgctttatttttttgcaaagtgtcaatccatccatttcaggcatcatgatatcactgataatcagatcaggttctttttttagaatcattgcaagtgcttcttttccattagtacactcgctcatgtgaaaatcacttgctaattcgcgacagatgtattttcgtatttcttcatcatcttctactaccagaacacgattctttgttctggaacgtattttttcgtcttcttcatcaactggagaagtgggtagggcagttgtgatatgtatgggagaattattgtcagtcgggttattatctatttcttcagcgttcagatgttccttgcctaaaggcaatcgtataataaagcgggagcctggtttcccctcattgttttctgcttctattgtaccgtgatgtaattctattaatgaacgacttagatgcaatccgataccagtacctacattagagttattgtggctgttacggatttgatagaaacgctcaaaaattcttcctatctctgcggggtcaattccgatgccgctatcttctattattatttcaaaataatgctgtaaagggcagggagcattcatatctttaccggtacggagataaatattgatttttccgttttccggtgtaaatttgaatgcattggaaataatgttcaggataactttatcaaaattcttaggatctatccatgcctgtaagatttccatctctgtttgaaagcaaagagtgatatgtttggcatttgcctgatattcgaaggtgtagtataaatcccggatgaaacccacaatgtcaatctcttgaaatttcagtgacatttgccctttatcgatttttcgaatatccatcagctggttaactagacgaagaatacgttcggcattcctataaatagtatgatagtttttttgccgttctccatctttatcagtagagataagcttttgcagtgggcttatgatgagagacatcggggtacgtatctcgtgggatatattgatgaagaattgtaatttggcttcattgatttgctctgcgtgaatatgctctaatatctcttggcgggcacggtaacgatggcgtacttggatgacgatgatatagatgatagctatcagtaatatcccatacattagtttggcccatccggatgcataccatgccgggtcaatggtgatacgtatttctttaatatcagaataagagtcattatcttttgcttttatctggaatgtataatcacccggacttaagttgctgaatgatactcggttgataccttgttgcaaactaatccaactcgtatggttaatgcgatatatataggtaattcgttccgggctgaaaaactccatggctgaaaattctatgctgaaagaattatctttgtgggaaagctggaaatgatcagcatccattactgcagtagtaacaatgtctttacctcctgattccatccctttctttaccattttatcatggatataaaagtctgtgatccgaatctcaggttttttacttgagttggttatttctgctggattaaaataggtgataccgtttgttcctccaaaaataagttcgctttgatggtatgcaaagctagctcctttgctgaattcattgccttgcagtccgtcacttgcatagaaattaatgaaactttggtttttggggttgaaccgactgattccataattcgtactgatccagagatatccattcacatcttccttgattgcacatatataattgctcggcaaaccattttctattgtatattcgcgaatatcaagactttggggattgaggtgttttaatcctttagatgttcctatccagatgcttccatcactaccctcgtgaagggcatagattacgtctccatataatattctcctgtttctcaaaggagaaatgaagtccatgttttttatgtccagacaccctaaaccgtcataagttcctatgtacagcttgccttcacttgtgtataagagactatttatccacgaattgtgtagcatattaattttagtccagtcggtgttgctattggtaagtatcgggcattggacaattttcctggtatttatatccatgtaaaataagccacctcccatagttcctatccacaatgttttattatcatcttctgcaaagcaatatatgttttctgtcaggttagacggctgtgccgataacttcagatattcgcaacgaccggtttggggatccaatcgagccatgccgtgaaggtaagagcctatccacagattgtagttagaatcttcgaagatactcatgatggttgcggggacagaatgtgggtcatctgtagggacaaagtgcgctttcagtgtattgtccggggcaattgcatagatcccgtcgttgtcagtacctacccagagagttccggtgtgatctttatatactgacatgacacagttggaaccaattacattatgtgcggaagatttataacccatatacttgaatttatttgtcgtagcaggtataatcattactcctttttggaaaaaacctaaccatatatttcctattttgtctttcagaatggaatgtactttagccttttttagattaaatgtagtaacattaaaattggcttccttaatcttttgtttttgagtatcatatattttcattccagaaccatcggtaccgataaatatttcattctgatccccaggatatagaattttaataggtaaatcaggattaggagtatatgtgagaggagtaaatgtatctgctttttcattatatatgaatagtcctctctttagactacttatataaagattgccctgttcgtcttcgcacatacttgaaactgtatttttagctatgtctttgtcacctgtatagtgtttggattggttgtttttatcaaaacggaagataccattatcacctgttgctatccataaatttccttttttatcttcgtatgtatatatgattagattgctggggataaattggcttatttgcttggcatttatgctgtctccctttgtttccagtataaacatgctatgtcctgaagtacctattagtatttctccattattgcgttcaagtattgtcgctatattgggggctattggatctccactggaaagatacatcggaatggtggtaaaactatctgttgcccgatcatatatttgtagtccgttcaaggatcctatgaagaagcgcccttttttatcttcgtacaatgtacgtacatagtcatttagtagagagtgaggattatctttctcatttctataaacagtgaattttgcaccgtcatatcgattcaagccatcttctgttgcaatccatattatgccgtcgcgatcttgatatagtttattaagcatactgcttgataggtccttatcaaccgtgaacattttcccttcttgtccatgaaatgtggtagataagcataaaaataataggcataaaataaatttgatcttcataggtattaattttacgcttgcaaatatacttaatatccgctatatttccttttaaaatatgaacttatatgtcgaatttcttattcagagtttgcggggcttttatgtttttactaattttgaattacggtgtaaatgatggataccacgtcaattgaaaagtaacgaatgggaagatgaagaagagagaaactaatgagcagatggagagacaacaaccgtgttattatccaagggaaggtgcgagtactattgttgtttttatacatggcatagtggaaggaccggatcagtttctgggtttaatgaaacgaagttccgaactgggttttgcttcttcttctttgttattaccgggacatggcggaacaggggaggagtttgcacgcagtagcagacagcagtggctggaatatgtcaatgcggaaatagctcgttataagaaaaactataattcgattattttggttgggcattctatgggaagtcttttatcgtttcttacttatatggaaagtccggagcaaataataggcatagtagctatagatacccctttatatgtgagggttaagggtagagctctcagaaataatctgaaggtaggcttctgcaaagaaattccggaaagtgatcctgctcatgctctattggaggcgagtagtgtagctccttgttccatactcacttatttgagttgggtaccgagaatgattgacttgttttgtttgatgaagaaaacaagagaggtactaccacaggtctctattcctacattggtctttcatgcagatgatgatgagttggtaagtgcttccagtgtgaagtgcttcgagagaacaattccggagaagtacttacaacttgttcacttaaaagagtcaactcattttttttatggaaatgcggactgggatttgctttattatacttttagccactttttacaatcctgttagaagttttgcaaaaacttcgacaggctctcttcccgtgacaaacctaatttctttctaagcctgtatcgtgctgattccataccccgttccgatagattgaatagtggtgcaacttctttggtgattaaatccatacggatatatgcggctaattttaattcgctggatgtaagatcgggataacgttctttcaggcggctgagaaagttattgtgtacgatgttgaagttattttccaacttttgccagttatcttcgtcttcgatattggcatgtactttctccagaagtctgttcaatttacgcaaggcgtctttggtctgttctttacgcagataggcagaaattttctggagttcatcttgcatgaaagtgaaaatttcctgcttttgaattacatagaacatggaatttgagagttcctggctctttaataataactcttgttgaagcttgttattttccagttcaactatcctcttttcctgtgcaagagcttcctcttttagtttgaattcccgtttaaggctttcttccttcagttcatccagacgtttttggtgttgcttgttgaatctctggttcaatagtttatagattccatatccgagtgcaacaaggagaagtacgtacatgatgtaagcataaatacttctataccaaggtggaagaattctgagatgaatttcttctacttccgtctggtgggtatgatgattgtaggcacgtataaggaaggtataatttccttctttcagtccagtatattcttttatgcctgaagcgttcaatgccagcatttgttcatccagcccttttagctgaacggaataagtgattttatcataagaattagtattcggattcatttcaaaccgatatgaagcatccggccgatattttcttaggatagtctgatgttgtctgtcagttggaaagccattgtagaaataagaatctatttcttcattgctggaagagattattacttttttaatcaggaacttgtaactgttagagagggatgacaatgaatctgtagtgatacgataaagactgaaaccatccagagtactgataatacaagtagccgagtccactctgttgatactttcgaaggtacccatcagattgttttgtaaacgggtggtactgacagaatctgttatataaccatgcggagtaatataattgattttcagtttaccggactgcatataccatacacaactgttttcttcattgctgactacacgaagataatctctgttacctatacgctgattccattcttcggataattcgaattcctgcctgatggagttataacgatagataccggaatctgttgtgaagtaaacacggcctttgtctttaaacagattggtctggtaagagttattctgattcggataatgctggcaggatactactttactatattccgaattcaacttgatggcactcagacctgttccatgaaatatccaccaaatatcatcagattcatcatattctacatagcgtaccgagagattaaaaccttttattttccgtgtggatatccagcgaggtgcaggctccgtgcctttgttttctaataaaaccaatccggtgtagctgcctgccagcactttggatttattttctccgaccggtgtaaagttccaaaagccattttcacccatcagggggatggccgttccttcctcaatcataaaggctccattattgtgaccgcagaacagagtttttccaatggcggtcagattccagacttgtccatcggcattctttacgggacggagagccaggtggcggatgtctttgataggccaggggctataatataatccctgattcgttccgaaatagatgtatccgttatgaataattgacgcgtagcctactccgtaattctggtttccggtatagaggtttgataatgggctgttggtttccagataactgatgccattgtcaagtcccaaccatatattatctccttcggtcacgttcagactcagtacggaattattttgcaggcccgaccgaatatcatattgctcaatctctcccgtaggaatatctgcaataatcagtccgctcttaatcgtcccgatataaatcttgtcatcctttatttctgcgcaatacagctgactggatttgagtaacggatcattttgagtgatgagcggaactgttgttgaattgtcatagatataaatgccatgatattcagttatcagtaatagcttttgatcctgataggggagtatttcgctgatatggtagttactgatcttttccgtacttgccaacggtataaataactgtccggtttgcagaaatacccccgcgttttccttgaacacatataaatttccgtttatattggcggagcagagcatacgttccttactttggataacagtaatttcatcgttcgtaagtttgaatatatggttgtaggatacaaagtagatgctatgatctatgcaatagatatcccatacatcactgaaattgcgatacttatcttccagactatcggataaggaatgatagtgcatagctcccttttcgtctggcgagaaataaccaaaattgttgaatgctcctacatagatacgttccttgccgtcatggtaagccgtccggataatcatgccattgctgaacagatgccatgagtaaccatcgaactgtagtaaccctgagttgttggctgcataaatccagccgttgttgtcacgggtgattgtccaattctgcgtgcccccaccatactccatacgactgatgttattgatataaggtaaccagttctttatggagtatgtatgaacggagaagatgagtaataacaatgtcagtgtgtatttcatttcagcctcttttgctccaaaaatataaatttattcaatatgagctatcggttcatggatatatctttccattttcattttctctttccacttcaccgtgatgtccggattgatctgtaaccgtgcatctatcttgctgaaaatcaccgtatctccttgccacattgcttccgaaggccaatctgcattgatgtatgaaaatgctttcacgacatccggattactctccaccgtattgaacagttccttgtaccaggtactccaggcacgattggcctgttccggattggaaaggcgtaactcggaagctacaactcctttttcctgaaacataggagtagattctgcaataaagagcggcttgccatgtttgcgagccaggtctatcatagcctggcaacgcccctgggcaaactggctgtatgcaaaccaatctacatattcatcaccggggtaatattgataaagttcgtccatacagctgttgcctccggtggattgccaaacataagctacattggatatgttcagtgaatcgaatagggtatggatacggcgaaaagctgtaatgtaagcttccggttgatagtgattccaggcatgcccgtcgaattcatagccgatgcgcagaaatactcttcggggggcaatgttttgtatccattctcccaggcgaatgatataactgtcatgttccccgctggctactttttcttcatggtttactaattcaagaccgatggctacgtcgcagcctttaagcaggggagatgcaagttgtgcgtccgcaaagcaattacctgccccccaattggcattcgatgtaagcccgtcaagtccctggtaagtatatccgtaagatacatctcccggacggatgttggtatagatggttatacctgccggagttccgaagaagttaacatatccttctttcccttctataccgcctattgcttccatatcctgaccgatgaaaaccaggcacttgccgtcttccggctcgaacttggcatagtttacggaagacttcttgtttgtacaagctatagcacaaagaactatagcgagataaaatagctttttcatatagcaaattaatagagtttacaataaaggtttgtattcaaagctgtcaaaataggcccatttgccccgtcctgatacatcctggcagcacataccgatgaaagctccggtaaaggcggctttgtattcaaacttgttgcaaacgtaatcatcagatataatggaagcatccaatgtaccccctatttcctgccatgtatccccgtcgatggaataactgaagttcaacttttctctctgaacggttgcccgtagccatacttctcccttttccagccggatatattccggtaacggttcactccagcgattatcatcattgacgaatatattcagcacatagctgttgagagattcttcccacgacatgaagagatagtaaaagtgccttgtattgtagtaataggccagtcctgccatttgctggaaagtatccggttgaaattccagtcgggtggtagctgtaaagttgaagtcttgttgtcgcctagctatcatgctttggtgatgggtggaacaaagtgattccttacctttaatactcaggaacccactccgtttcctgagtgatacccaggtttcatccatcggtacacggagtgactggaagtcgataggcatagtctcgtcttcaaaatcacatcgttccggtaaagcctcccaacggcagactggtaaatcgggagcttcaatttgtacctgcggttcattacctccgcttttcagatacagccagtcatcttcgtgccacactacttcttgcaggcatgtttcgcgccccagggtacatctgccacgggtagttaatggtcgccctgcaaggtgagtcagataccatctgccatcgggagtagatactaccgagccgtgacctgccttttggagatacaaatccggattgtgagcggaagtcagtaccggattcgtaggatgtacttcgtagggaccagtaatctgccgggatcgtgccagagttacggcatgattatattccgttccgccttcggctgttatcagataataccaaccgttgcgtttgaagagtacgggaccttccgtaactcccaatgcagtgccggggaagatgtaataaacctctccgataagccggtgctcccggtaagaatattcctgcaagacaattccaccgaagaattttcctttccggtgatctacaagcagattgggaacccaggcgcgtccgtcctcgtcatggaacaacgaaggatcaaaaccgctactgttcagatagatgggatcggaccattcaccgtctatctcggttgccgtcacaagatagttgtgtgtatctttccatctgccgtcgaagcgcttgacatctgtgtagaccagataaaacgttccgtccttgtaggtcagattgggtgcccaaactccgcaggagtcgggatttcctttcatattgagttgagatacacgggtgagtggtcgggttagtaaatgccagtgaaccaagtcacgggagtgatgtatctgtacacccggaaaccagtcaaaagtggaggtggctatgtagaaatcatctcctacgcggcagatagacggatccggattaaatccggtcagaatagggtttgtaatcatattcatagtgctaagttgtttttatgagttctttttccagttcttccatgttgcgtccctttgtttcggggtagagcagactgacggagatcaggcagaataccatgatgatagcataaatcataaaggtattgcctgcacccagatgttctatctcgaccgggaacaaggtggtgacggcgaaactgataattccgttgaagacacctgcaagcgatatacccaatccttttacatgatacgggaatatctcagacagcaatatccaggtaatcggacctagtgaaatagagaagccgactatcatgcagagcaatccgatcaggataatgacgggggaccccgacatataaaacgtggcagatacagtcagtagtgaggctatcatgatacacgaaccgataatcagcagaggttttcgtccgagccggtcaatcaatgtcatggatgcgagggtcataaccaccatacatatcccgataaggttggattgcaggaaagagctgtcgggggtgaaacccgccatgtcgaacaccttgggtgcatagaataataccgcattgattccgcatgccatctggaagaaggcgacactgaaagcaataaacagtatcagccgcatcgggcgtttaaacaatctgcgtccctgttcctgataggagagggcagtcttttccttgtctttccgttggctccggttttcggtccataccggactttccggtacaaatgtcaatccgattaggtagataatcgggaacaaagtacccaatccgagcatccagcgccatttcagttccggactgtcgaaccagccattcaccaacgtattggaagcgtaagccaccagataacctactccgatgttcagttgattgaacgatacgagaaagccccgcttatcggaaggtgcaagttccgcaatgtacatggggactaccagcagtgagattcctatacccagtccaccgatgaagcggcttatcagaaaaaacagatacgtctgactgagtgcactgcccaatgtacagaagcaaaagagcagtgctgccagaatgagtgatttctttcgtccgattctttcgctgacatttccggcaaagaagttaccgatgaaggttgccagcatggtgatgcttacagccagcccttcctgaaaggagccggattgcagaccgaaaaagtcgccgaaatacatgcttgctcccgatacattggccgatatgcccagcagcagaccacctatcgagacgatgaagcaggtgatgtacagatatgcattgtttcttttatccattgattgatttattcagggtaaataattacagtgtgtttattggggcagtttactccaatccaattccgcagcatgtatatagccattgcccgaaactttctctttccagtggttgcttacatattcactttgctgaatacgtgagtcgcattgctggaaggttacatttactatccacatcggttgagagagccattctacattgatgtaagagaaagctttaaccacatcgctgttttcttcgataacactgaagaatttggtgaaccactcatcccatatcttccgggctatctcaggctttttgatatccgcatcgaagtaagtctgtcccttctggaagacgggagtcgattcggctatgaataccggtttgcctttcatccgggcaaattcgatcattacctgatccggctgcccgaaataagagtaggcacaccagtccacatattcatctcccggataccatttctgcatatcggataggggagtaccatctcctttggattgccatacataagctacgttgtggatgcctgccgcatcaaaatgatctttgatgtgtttgtaggcggggatatacgtttcgggtacataatgattccagtctgtaccgtcgaattcatagccgatacgcagaaagacgggacggggagcaagcttcttgaaccattcacctattatatccagcttccggtcgtatttgccggatgctatgtccgtttcatttcccacaatggcaagccctacggcgatcattgagttattgaaacgttccgattgagggtataagttggcacaacaatcacctgaaccccaattgtcgatatcataaagaccggatactttatcggtgtcgctaccgcccagtcccaagtaaacggttattcctgccggagtctggaaatgatcgcaatagccttcattgtactgttccagtccgcctactgctcctaaatcctggccgatgaagacaaagcatttaccgtcttcaggttcgtatttggagagttcccgtccgttaggttccggggcgggggtatcatgctctttattctcacatccgatgcaggaggtgaaaaggaggggaagtatgatatactttaatattgatttcatgattgatatgagtttatagtttcattgtacttagttacgagctacaagctacaagtgcctttcggaatatagcgcagctacttgtagcttgtagccggtagctcgtaacttttccgagaggagggattgcaaatctgcctgtatttgtgagcggctcgtcccagcctgctaggacacaccgtcccatcctgctaggatgcactgtcttaacctcctaggacgagccgctcacaaatgcagggacgaggttagcgatagaagaacaggggaggttttgtacccgggcggaggacgactttttatcccggtatagggatagcctcctatcccgggtacgggatattttccggcctttgatagtaccagtccttcggtaaccgcatctccattctttcatcactaaattatcacttagttcagtagggttatgagttaaatgataaccccaatattaagtaaatagagtatctcaattcccctcctccgtcggaggttgctctcccccgataacgggggagccggagggggtgggtgcccaaagggcagggtggtaggtaaagcaaaaaatacctatgaaccatataaataaggaattattttctcacctaccacctcccccttcgggtactcctcctcccaagaggaggagaattaagatagtattacttgaccatttagttcctttctaatacattcggattcttctctgtttcactgtgaggaatgggtagatagtaattgttttcattgaatacccgttcctcaatggttactattttatagttattattgtttccgtcaaactcaaccgtcattcccttgatgggtgcccgtagagtcgctgcttctttccagcgacgcaagtcgaagaagcggtgttcttccagacacaactctacgcggcgctcattgtgaatacggatacgcatctcgtccttggataaaccttccggtaatcccggctggcctgcacgatcgcgaacctcgttgatagcatcatatacactcttatccggtgcagccaatgcctcattctgcgcttcggcatagtttagtaacacttctgcatagcggaaataaggccagttgttatcctgtgcaaaggctccggtgtataagtcggcagatgctccgtcatattcctgcatcattttgcgaagtccatacccgcagcgtgcgcggtaatcgttgggcaggcagttaccgctccaatccgggttttgcagatggcgatgcatgagcaactgacttccttcccagtaacttccatgataaagcaaagtctgatagaaacgtttgtcacggttagcgtatgggtcctgtggattgtaaatagatgtaggatcggttatcaatttaccgtctgtggtttcataagcatcagctaagttctgggtgggatataaaccgttccaggaaccgcggtcggcatcggcagggtcaagactccattgcatgtggatgttgtgcgtaatttccgggaactggaagcggcgctcaaagatgatctccgtgttggcattcgatttatcgaagaataaagaaccgtaggcatattcaccgttgcggtaaagatgatacactcccagagtcatgacagcttgtgcggctttggcagcatcttcccaacgctctttagagttggaggcattgttgagcgggctggcaagatagagcagagcacgagctttcagcgccaggaaggcaccacgggtggcacgccctttcatggcgtaggaaacggttgggtcgagatcttccgcatagttatcgctctcggtggcaatgaagtttatcaatccttcgaaatcggtggccggtaccagcagattgtcttccagttgctgagcttccgtaatcaacggtgcccgtccgaatgtcctggcaaggtcgaagtaacagaatgcccgcaggaaacgtgcttccgcttcgtaatatttcttttcggtcggtgtcagcaccacgtctttggtgtccggaacggcggcaattatcaggttacatttgcggataatgctataattactcttccagatttcatcgatgaacggagtgctttgcgctgtgatctgtcccgtattaaactgatttacatttgcatcgaacttgccgtcgaagtcgtcggcgccggcatcgaagttaccgccgaaagcggcagcccagtcctgatcccatccctgtgtattacggttgaagccgcataccagtgtaccgtacgtattggctacgaattgatcgataagctttttgtcctgccaaatcaagtcgtcggagacaaatgtcgtaggcttgatgtccagcatatcagtacaggaagtcatgctgatagcggcaagtagtatgaataagggtttaaatatttctttcatgatattgtctgtttaaaattgaatactgatacctgcgttaaatgatttcatttgcggataagaccaaccttgtgagtttacattttcggggtctatctgaggaacatcggtaatggtgaagagattctgtccgctgacgtacacacgtacattctctaaacggaggttgctcaaccatttgcgcgggaagttgtaacctacttcaatgtttttcagtctgaaataagacgcatcatacagataggtctgcacgggcgggaaatccgtattcgggaagttgtgcgtggactgctccagacgcggataacgtgtgccgggattgttctcgctccatgcttcttttacccagaattgaggcagattgccatcattgaagtaaggcattactacgccaccattcagataaacctgcgcatgggctgctccctggaagaggaaactgaggtcgaaattcttccatgccaggcttccgttgataccgtatacgatttccggtacgttgccgtatcccagataagtcatatcaccggcatttaccacttcgtcaccgtttacgtttacatatttgatatcaccggggcgggtcacatagtcgcttcctgccacttcctgtttggcatacgcatctatttcctgttggttctggaagatgccgtctgtcttataaccgtagtagctgtagatgggacgtccggtttttctcaggtactcggaggttcctgcggcctcagccatttccaatatcttgttgcgggcataagtgaagtttccgcctatggagtaacggactttaccgatgtgatgattgaacgtcaggttggcatcgatacctttattctccaccttgccgatattttcaagcgggagttctccaccgaacgaccagggcacttcggctcctcgctgtgcaaggatgtcggaacgggtttctttaaagaaatctaaagacaggttgaacatatcaaacaaacctgcatctatcgcgatattcatcttcttggaagtttcccaggttgccagtgcattggctatggggccgggaaccaaacctttggtaaccaattctccgaatacgtagtcgccaaggttattcgccagtccgccattgtgcgaaccgcgtgaagcgtacaagtcgaagcggctgtaatacgggaaggctacaccaccggtattgtcgttacccaatgtaccataggaccctctgatcttcaggaagtttatcttatttttcaaaggttcgaagaacttctcttccgaaaccacccagccgatagatgcggatgcaaatgttccccaacgtttgtcgggagcaaagttttcggaagcgtcccggcggatattcgcttcaaacaggtatctaccgccataattatagttgattctacccacatagctgaggcgtgccgactctctgtcatatccacccaattgctgtccggtactgttaccggcactgatctgatccattacgtccgagtcgaatgagttgcgggatacccatacgttgtggtatttttctttgcgtcccaatgccatcaacagggctgaaacggtatggttgccgaaagaacggtcgtaggtaagatgtccctgccactctatgtattcgttgtcattctgattctgatagagtgaggcgctgccccgtggctgcaagttgtagttgttgtcttggttgcgtacatacaggtaaggggagagtgaccaggtcttctgggcataattgtttttatcgtatgagaagacaccctttattttcagtccttgggttacaaatggaaggtcctgagtcagttcgaggcgggttaacagactgttgtttcgtgaatcactgtatcccgcgtctttgctggtttgcgccatgatgttcgggtgagtggcatcgggtactgtgtaaaggccattgtcatacttggcaagtagcacaggagtattacggatcagctgctggaagacattggtactgctctgcgggcttccatgacggtattccacacgaccggatgcatctaccgagagctgagtggtagaagtgatctttacgtcaatattgcttcttaaagagtagcgttcgtagttcagattgtcccacaaaccatcctgatgtacatatccgaagctggtaaagaacttgatgttatcgcgtccgccatccacggtaatgttgtgctgatgctgcactgcattctttgacagcatttctttgtaccagtcggtattcggatagcgttcgcgatcagagccgtcggcgaattttctgatttcctcgtctgtatagattgtattgcccatgtatatgttcttcatccgggcatagtcggtagaattggcaaattccggcagacttgtaggcttctgtattgatacgttacccgagtactttacgtggacttttccggtattgcctcgtttggtggtgaccagtataaccccgttggcaccgcgcataccgaagatagcggcagaggcggcatctttcaatacgttcagcgattctatttcattgggatctatgcgggcaaagtcttctgcctggcgttcgatgccgtcgatgatataggtaggtgaagttcccccctggaaagtggcaacaccgcggatatagatttgtgagccgtccagtcccggttctccggtggtttgtttggctatcagtccgggaatctgtccgataagtgcgttggaggtatttgccgattgggctttcaggatctcgtcgcttttcacggaagctacggcacctgtcagatttactttcttctggacgccatatcccactactactacttcatccagtttcatgttgtcttcactcataactacacgcatatctttggctgcggcaagtgttacggtgcgatatcctatataagatatcttcagcatgtttcctatgcgggcttcgagcgagaatttaccgtctatatcggagatggtgcctttttgtgtcttctggtcctgtatggatacaccaatcagcggctctccgttttcatcaataaccagaccttgaataagactctcttgtgcgtatccgcttgccgttataagaagaaatagtatccatgcaagaggccgcagtgtgataagtggcagtcttttcttcataatattaaaagatttaatcgttaataatagtgttttcatgcaatacagggaataaggaatatccgaaattagcgcgcgttgtagtccgtccatcctttggcctgtttggctgatacaaaagtagagggtgggaggagtaaaagcaagcgaatcactactctttacatacttttgccggaggtaaattatacgtttgaaatacgtttgctgattgctaatatattgataaatagtcgcgtatgtaagcatggactttgttcgtgtataaaaatagccttcctgttttcatagaatcagccgaatataaaaaagaggggaagcgttggcttctcctcttaaagataggtttgtgaagtatgtgattaccttctttcattcagcattttcggtgtcgggcattcatggttgtcgataggaagcttcacttgtttcaaatcgtccaattcatgtatcggtctttccacttcgtaaggggcacgcatacccgaaaattcctggaagtatagcaggcaggcatctttccaccatacggcatcacgtgcctgtatcttcaggcgtgactgtacatccttgaaacgttccgcatcgatatagttctcagccagatcccattttttctgaaagcttcttacctgctgtacaccatgatcgtagcgatagcaaagctcgtcccataaagtacgtccgctctgcatggtgtgttgccaaggggcatgatggaaccacaagagatactcatccggacaagtacggatgtcatcgtaaaggcggcagagtgaatcgggatattgggctgtagcattgctacccgtatgactgcggtcgaaacctatcccctgtttgtctgctttatgatagtaagacggcatccagtcggggcgtgcaccgggcacgtcgcaccaaggttccgggccgtaatggtgtccccatgcaaagagatgatgcagcccgagtggcatcatatagtctaccacagcctcgcggctttccatcatcatgttatgtatttcataggcaatgggtgcatgtttgggattacttgcatcgaagaaagtctgtttcagccattcttctgcgattgttcccgatgtcagggaaggattccaggccatgcgcccgaaagcgtaccagttggcttgggcgaaaggatggccgcaccagtttgtatccgtacctatattggcaacacctgctatggctttcagtgaagacggcttcacaaagtcgaagaactcttcccacatcggggcaagataggcaaggtgattggagaagcccagatattcttgtgtaatctggaattcgaccatctgcggagtccggggcatagcgccgaatagaggactatatggttcgcgaggctggaagtcgaccggaccgttctttatctgtacgatgacattgtcgcggaattgtccatccaaaggctggaattccagataagcttgcttagcgcggtctgcatccgttgggctgtagacgaaagcgcgccacatgacaatacctttatagggcttcaatgcatctgccagcatattggcaccttcggcatgtgtacggttgaagtcgcacgggccgggctgtccttcggaattggctttcaccaggaagccaccgaagtcggggatggtgcgatagatctctttggctttctgcttccaccaggcgatgacatctttgtccaaaggatcggctgtggaaagcccgcccagttgcatgggggaggcaaagttgatagagagatataccttgatgccataaggacggaatatgtctgccagagcctttaccttttccagatattcagcggaaaggattttagaggaagcatttacattgttcagtaccgttgcgttgattccgatggaggcattggcacgagcgtatgcttcgtatctgtcggagagtgtgccgggcagttcttcccagttccagagagatttgccggcataaccgcgctcgatgctgcggtcgaggttgtcccaatgattgagaatacgcaggtcataggcaggattctccgttatttcctggtctgtttccgaaggctttccgaagttctgcatttcttgcagacggatcaggtgataggcagcataaagcaaacccgtttcgctgggagaagtgacggtgagttttccatttacctgtcgtatgcggaagccttcagaagatagctgtttgtctttcttcagtacaagtgtaacggggagccctttccatgcctgtttcagttcacggacagctatgtttagtgtcggagactggcgaggcactgtaatctgtgcgtgggcatctgtcgattgccggagccacaagcggctgccgtcttccgcggatacgggtccgagtaaacaagataataataagaataaagagagcagttttttcataaacaaaaagtattggttggtttattcatcggcggggtagcgtactccccattcgcggcgtaagtcatccatcatgcgcatgatgcgcagggtttcggcgtgaggcatatagggagattcgagccacccgttcctcagagcttccatggatgcatatacctggtattcgtatccggtgatttgtggcggacagttgtagacaactgccgtcttataatcttccgttattaccctgattcgttgcggattgttgatattttcaatgatcagatgccctttgtcaccggaaatgatgccttggcggtcggtcatactcagcatactgctgtgcagtacagcgattttcccatccttgaatgtaagagttatactattctgtgcatcgactccggtatcggtctttacgcaggtagaggtgatacgctctacgtccgtcccgaaaaccatggaagcaaagttcagtgcatacactcccaggtcgagcagagccccgcctgccagtgccggttggcggagacgctcacggttgccgattgggtaacccagattggcagacagcgtcatggggcgtccgatgattccaccgtttacaaggtcattgatggtttgcgatagaggcatataacgtgtccagatagcttcggtgatgaagagctccttttctttggcaagattcagcagttcttccgcctgacgggcattggcggtgaatgccttttcgcataaaacggctttacctttcagcagactcatacgtgcatgttcaaaatggtgagaatggggagtggcaatatataccaactccacctcttcatcatccagcatttcttcataagaaccgtaggtacgggtgaaaccccaccggtcggcaaagtcacaggcagtctgcaactggcgggaagcgactgcataagcttctactccctccattccttcgagggtgattgccatcttttcggcaatccacccggtacctataatacctattttgacagtatccatactctatactctatcgggcaaaggttaatccagtccttcaatggtgataatcttcccttcggcgtcgtattccagttcgcatactttcaggctgcgcaaccaggtgcgtccgccggaaggcacactgtcgtgatggaacagataccatttgccccggtattccacaatggagtggtgggtagtccagcctaccaccggagtcaggattactccctgataagtgaaaggaccgtaaggattgtcgccgatggcgtagcacaggcggtgggtatcaccggtagagtaggagaagtaatactttccgttatacttgtgcatccagcttgcttcgaagaaacggcgttcgttgtctccggctgtcagcggttgcccgttttcgtccaggatcactacggctttaggttcttcggcaaattgcagcatatccgcactgagtttggcaacgcgtccggggatggacggctcgttgtctgcggggaaagtagctccactttccagagctttgttgtcgcgatagcgttgcaactgtccgccccacagaccaccgaagtacatgtagtagttaccgtctccatcattcagaactgcagggtccatgctgtaacttccgcgcattgggtcgggttggggaatgaacggaccttcgggacggtcgctgatggcaacaccgatacggaagatatcattctggtctttcagggggaaatacatataatatttgccgtctttctcagctacgtcgcaatcccagagttggcgtcctgcccagggaatatcttcggtggtgagtaccaggccatggtctacgatttcacctttcatggggtcatcggtagagaagacgtggtagtctttcatattgaaatggtcaccgttgtcattttcggggataccgctttcccagtcgtgggaagggtagatgtaaaggcggtcgttgaacacatgcacggcagggtctgccatataatctccgggtaccaagtatcttttttctttcttcatgactctataattttaaaggttaatattcttatttgtttcatcttatcgagaaaatagtttcagcttgaagaagctataattttgcgatcctccaaatggctatgtggcgatccacccaataggtatgtggcgatctaccaaaaatgagtgttctctctgttgatctttgcctctaatagcctcctgtagcataaatgccgaccatggttccagtaaaacctccggctgtctgcgtgcttatcaggtcggcggagacggggtcgcctacttgcgtccagttacctttaggactggtggagtagctgaaggtatagtttactgcattatctccttctactttcagatatacttttccatctgtccgggttagcgggctgtttgcttggctgcacagtctgccatggctgtatgtttccagaagcatgacgggtttgccgtcttggtccaatgtctttccgaagcgaatatagcaattatcatcatggaaacagatgatacccgcgaaatccttcggttgttgtggcacgaagtccaagccggtctgagctgtgaatgtccaattgttaatccagcggccgatggcggcaggctgacgcttttggttaagatcagtgctgctggcggtcatttccaactgccctttgctgtttatatcatagcagggtaccagtggagtgcggatgaaaaatgcttctttagccagtccgtttgctgtccatagtggggcaggaccgtaggagcggtcggcggtataagtgatgacatcaccttcaggaagaataatgggttgattctctttccaggttaccgggagcatgaaagtctcgcgtccaatcacgtcgtgaccgttgcggtaggggcggacaccaaggaagacagcataccagtcgccatcgggagtttccaccagatcggcatgaccgacgcaggtaaccgggttgggacggtcgcccgacaagccgcgttgcgtcagtatcggattgatggcacaaggtttgaaagggccgaacggagacgcagaggtgaagatcacttccgagtggttggggcctgttccaccttcggcagccatcaggtagtatgtgccgttgatgtggtagaggtgtggaccttctatccagctgggatgctgggttttgtctacgcccccgtcaataatcatcttctgttttcctacggtacaaccgtttttccagtcaaattcgcgtatccagatagcgcggtgaccgtcatattcgggctttcctgccggaccgtcattgttcacaatgtatgctttcccgtcttcgtcgaagagaaatccggggtcgatgccgcccacttcgggcaggaaagtgggatcactccagtttcctttcttcggatcatccgtggtgacgaagaagttgccgccaccgtctacggctgtagtgatcagatagaacagtccgttgtgaggattgtatttgatgtccggagcatagataccgccactgatgcgcaggccgtcgtacataggcaactgtgaggggcggttgaggacgtagcccagttgttcccagttcgtcagatctgtgctgtgccagatgggtacgccggggtagaaggcgaaagaggagttgaccatataatagtcgtttcctacgcggcagatgctcgggtcgggataacaacccggtaatacgggattcaatgtacccggtgtggtaacctgatcagttgctttatcagtatccttgggagctaccgtatatgtgaactcatcgaacacggcctttttaggttccagaatttctttcaggaagggcttaggctgatagttacggtcgaagagtaggggatattcccgtcttcccggtacgggccagtcattcttccaggagtcgccatccgatactccccaggcggttacgcgtgtaatgacgtccgagtgctttatgaaaagttccatgaacgatttcatacgtgcattccacagattggaaacactatccggtagagcttcgggatagggatttaaggctttctcaaaggctactttgtcggcaatatttgctccgcggtttacggttggcaaagcactcatgtcccattccgttatcatcactttagcgcctgtggaggcaaaggcgagaaggctggtttcatattcacctatgctcgggtaatccaatcccatgtgtccctgcatacctatggcatctatgcgcaatcctttttctttgagtgaattgaccatacgcaccactgcgtctcggcgtcccggttcgtgcataccgtagtcgttatagtagagttccgcttccgggtctgcctcatgtgcatattggaaagccagcgggatatattcttctcccagtatctcgtagaacttgcttttgcggtagcttccgtctccttcgatggcttcgtttactacgtcccagcctttaatgcgacctttgtatcggcccacgatagtatgaatatggcttttcagtcgctctttcaggacttcgggtgaaacattctttccttcagcgtctacgcagaaccaaggtgagagctgggaatgccacaccaggcaatgcccgatgatgaacattccgttatcctcgccgaacttaacgaattcgtctgccaggctaaagtcatatctgtcttcttccgggtgtatcacttcactcttcatgcagttttcggccacaatggagttgaagtggcggcgcactacatcgactgcgctggtgtcgcgccccgcagcctgttcggaattaatggcgacaccgacaaggaatttatcaccgagaatgtttgttagagtcgggtctgctgcaacaggtttatcactattacaagacattaatgcggcagcacaaactgataatgctaaatactttaatttcatgctataattggtatgatttggttgctgaagggatttactcttagtgtacgggttatgagttaaatgataaataatcttttagacgcggatggcgctaatcacttatcaccaaacactaatcacttttgttcttttctataccattatgaataaatcctatcagcctttacacttaataatcttctttacttctgcgttccgtcagttcagcctgcatctcttcattatacttctttgtaataggatagaagtacagcgctatgacgccgatgaagaacgtaacggccggaataatactggatgaaagcacgataccatgaatagccgattcgctttgtgcgatccctgcgcctgatacataaccgaaaccggagagtaggaaacccaatatagcgcctccaatacccaatccggctttcagtgcaaataccacacctgcgaacacgaaacccgttgcacggcggtgattgacatattccgaatgatctgccacgtcagcaatcatagcccaaagcaacggaacggtaggagcgtatgccaaactcttgaggaagttcagaacgaacatcgtctctacatccgtctcattcgggaaatagaagaaggcggtgaacactgccgtcagagccaaacaaacgataaataccgatttctttccgaaacggttggccaggaaaccggacaggaagataacgccgaagaactgtaccactgctcccagcatgttgaacacaccgaagcccacttcatacgctttttcaggactgctgacaataagaccgaaagcattcagtatcgtatagcccaccgaatcactggcctgtgtagccaccaatcccagcttatcgaggaaggcaaataatgcgcccgaatccacataattttcaaaatagtagttcatagcgcttccccacatggcaagggtagtgaaaaggaagagcgtcaggatgaacatagcccgccagggaatattcttgaatacatccttgatgtctttccgggtatcagttttctgatttgccggcggtgtgatacgttcgcgactggagaagaaagtaataaccaggaacacgaaaccgatgactgcgaataaggaaatagtgcacagccaaccgtgccccttatcaccgctttcacctgcgaacttgcttaccaacgggagcgtcaagccctgtaccacaaactgtgcaatggtagcggcaacgaaacggatagacgtaatgcttgtacgttccttgatgtcacttgacattacaccacccaacgatgcgtacggtgtattgttgaacgagtaaagcgtcatcaacaaggtataagagattgtagcgtacaccgctaccaaacctttatcctcgatgccgggattgtagaatgccagcacatagaacaccatgaacggcaatgcggtccagagtacccatgggcggtatttgccccatttggtttgtgtccggtcggacaatatacctacggtagggtctacaaaagcgtccacaatgcgggcaatcagcatcactgatcctgcaatggcgccttccagaccgaagacatcggtataaaacttggtttgataaatcatcatcatctggaacacgaggttcgcagagcaatctcctaaactatagccaatcttctcggccatagacactttttgacttagtgcgttcatagtgctgtattattcagtttattagttatctgtcatttgttatctgtttccagcgcactttctgctgcgcgttgtcccagggttttcttatccaatggatgtatatcgttccattcgcccaggtcactgttgtggatgagtcgggtgttccggttggtttcagctactttggcttgttctttgcgcatctcagcccaggcctgccgaccgctgacgtcatctcgggacaggaagtctgccagttctacaatgtagaaaggtaattccgggttgccgaatgtgctgcgccaatcagcaatcatagctgtcagtagtgcggcgtattcattgcggcggtctacattggactctccctgataccagaatacaccacggatgccatagttttgtaacggagcaatcatggcattgtacaggcataccggtttgtaacagaagaacatcattcccggagccggaggcatggaagcacctaatctgtatttccattctccttgcaggcttacttcttcatttccgcaaacaattttataaggcttctcctttacaaagtgcggataaccgttattgctgatgaggcgtatggttactgtattctttcctgctttcaacacacctgccggaatggtatagatgcgtggaggatactggtaggaaacagtacctacgaatgtaccgttcacatagacggagtctgcatctacgatgcaacctaaacgcaaggttgcttcttttccgttccagtcttgcggtacttccacttccttgcggaaccagtgcgaaccgtttatcggattcaaaccgttggttccccagtcggtagagaataaatcaacggtcttccagtctttatcactgtagttggcggcataccaaggtgttgcttcgtgcagtcctgcatctccccggtatagggaagtgttccagcgatagaagctcaaaccttctgtctgtttaatgcttttcagataagcatcatcctcatattgccgtttatcattaatatacttcggaaattctttcagtccttcttcgcttatccatgcctcaacgggagttccgccccaactggagtttatcagtccgacgggtatgctgttcttttcatacatggctttggcaaagaaatagcccagagcggggaagttcatgacgttttcctgcgtcagtggtttccaggcaacgtaatccggcaagtccgtttgcggtgcatggaagttgaagatattgggtactttcagttgccgtatattcgtgttctcgtaagcggagatttcatcacggaacatatccgtaacccggctgacgggcagttccatattggattgaccggagcatagccatacatctcccaccagaatatctctcagttcgatgtcatttacttgaaggatgtaaggcccgcccggtttcatggcaggcagggtgagggaccattggccgttttcatctgctgtggctgtgtaagtagcttttagtttcccaccttttacacctgtaggggtggcgttcttcaggaactttacctgtacgctttctccggcatctgccgtaccccatactttaatgggttgttcgcgttgcagtaccattccgtcagaaatcaaggcaggtaactttacctttgcgtttaccatggaagtaacgcaaaggcaaagtaacactgccagactcaacctaactttattaaaactaacctgattcatatctaatttgtctttttattcactacttagctactacctacttatactcatacaacttcacatgaagtatctggaaatctcccactgagatgcgcacatggcgcccctgatggtcttgatcaccattcagacggcggatataagagagcgtaccgtcttcgtttaccttcacttcatctacggaaccgatgccgcatcgtgcccctttccacatcaccttatcacttatcactccatcaccctttcctcctgcctgggcaaatccgtcttcgcccaacgcccggactttggcttgattttctgtagctttctcaaactcgataacgataccgctacctgctacgatatactcattgggtgccagtcttaataatacacctccaccttcgggccatacactgccatcggtggcacgcgcatcccagggaagagtaaagaaatggcgacaggttatcttcagatcatcctgataaatgatacgttctttattttcctgatcgaagagtaatcctttcattgcgcctttaccctgatacttagcgagcagaggcatgaactctttcagcgtacgatagcttttcaccaacggagagttgggagagtcggaacctccttcgatggagaacgggctgataccgatggcatcatgttcaccaaagatatagaaagctcttacgccattattgtctgtcagtttgatttcggggataaacaacgggttgttgtgtaatttatatttagctacccagtctgtaaagccattgtcgtacaggtcgggagcaagaaggtcgatgttgggcgctccgcaatgccatatatcaataaggtgtgccagcggaccggcagaaggatattctcccggtttccggttgcggctgttcatggcagcgttcacgtatagtggaatattgtagatggaccgggcgctttgtgccattctttccacatagcgggcgtagtgccaggccataaataattcatcggtgtaaatatcggctccgaatacttcttgccaggtgccttgcttcttgctaccttggctttcccatttctcaagcatttgggggtggagcgttttcttatttttctgcaagtaactcattaattcagcgggcaccggtgcattgaacagtgcgttggcctctttagaatagtctctcgcatcttccagcatacctatctcattttctatctgtatcatgatgacggtaccttcctctttatcaatggctgcgacgtgtcccatccattgagaaaaagcgcggttgtcggcttggaatacattttcagagaatgcgctggctatttcgagtggttttcctttttgtgtataagcgcgcgggtatttcttatagttttctttgaaccagaggggagcgtagcaactcatggagtttttccaggcaccgaaccaaagaaagattactttcagatcgttctgccgggcttgacggatgactttatctgtgagggtgaagtcgaattgtccttcctgcggttctatcaaatcccagtatgcgggaacgagtactgtattcagtcctatccgttgcagcttcgggaagatacgttcgatatcttctgtgcatgctgccgatgaatttcctaattcaccgcctaaaataagaaatgttttgccgtctactactaattgagtagcggtgccttgtttctgtaatgtactcttttgagcatttacatacccaactgtcattacactcaaaactaaaattaaaatccaattcttcatcgtttgtctctggtattgatttgagatgttttccattgcaacaaagatagtgagctataatttagaaagcttttcgcagtgttgcagaaaacttcatttcggttacatcattcctcaatgatgttacataattttttgtttatcgtacatttccctgtttcagggggtaaaatggatgtttttaccggattcgctaaatgatttgttaaatggaatccgataaggccggagccttaccggatttccaattctaaatttattcaataatcaaatttcccgggaattcagcgcctacatcttttcctgcaagaccatcgcatacacctttatatgcatgctttcttgcatagtttgcatcgaagatattgggggcgtcgtccgggatccaatatacatgttcgtccggatgatcactcagtgtccatatagttatgccggcttgcaatgtttccggaatgagttccttgtatttgtcaataacaaactggtacatttcagcttgtgccgccaggtttgctgttgtcggtgatgaggtgttgaccttgatatcaagttcagtaatcctaatcagtttattggtattggccaaagttctgaacatttctacaattttatctttgtcactgtcaattgcaatatgcatttgagttcctataccgtcaacttgagcgccattctggtcaatgtattgtacatactcaatcagtttggtaagcttattcggattatattccagattatagtcattgataaataatttagctgtcggatctgcttcccgtgcccattggaaggcttttacagcataatccttacccatatacttaccccaatagaaatcgtcactatccatatcaccttcgttaggcataacttctaccccacgtagtttgccaccatcgtcgataggttcgtttagtacatcccatgagtgaacacggtctttataatggcctaccattgccttgatccacgtttccatggcattgctgatgatttccgttttctcttcatccgtcttctccacatactcgatacctctggtgcttgcatggcgggcaggagaagtttctgtgttgaacggatccagtgataccatgacatcgtcaatcaggtaagtgccggccttcaatcctaaatcaaagtttataccttcaatctctccttctgctgtaaaagtccattctattcgttgccagtcgggagttacggattggtttccctgataatgatccttaccagttgttgatatacgtgcggaacctacaccttcggtagttttgatataataagagatatagacttgggttcctgtttctattttttgtgcgaggttggcatggatttgtattttccattctcctccgtcattatcagaagggttgataacttgcagacatcctttagctttgtttccttctgtttcattccatgtattgcaaccatcgggaccattccatttactccaactgtcaataccgtctgtgaaactaccattatccagtaaactacttctaccggcatccggatcttctttcttttcgccgaacttgaagtcatctatataatagatacctgcactgccaccgaaatcgataacaatatggtccatatccaagtctttctcgtcagctgtaaattctgcttcaaaagaagtccattgtccggctggtaatttctggctgaggtaatgacttccagagtagcttgtacggttttgtagctgtatctggaataggtcgtcaccctccattgacttgacatagaatgtacatacataagtagttcccgctttgaaatagttggccggtaatgtatagtaagcctgtgcactgtgattggcacctgccacggggtttgtcaatttcatggcataattgctgttgtatccttcaccgcttgaagatatttcggctttgcatccggcgcttgaccatgctccccaacctgtgattgctcctgtctcaaaatcactgttaccaataatattggtcattttgtccgtatcatcaggaatgatgattatttccggtgcaatcaaattgtttaagtaagtggctgcctgttgtgtatgccagattagattatggccatataaagctatatcctgaggaagaacttgcaggaaagcatctacttttgtgaagtttgtttctcctttgccattcacaatggcatccatcttcatggcattacccagcgtaacactattaaagtttgcgtctactatgctgcgatacttttcgtcagccatatagatatccattcccatgccgagaccaataacgaaatcagtacggggaatatagctcttgattacatcatagcgggaaatctgttcggccaatgccaggggcagttccgaactggcgacgccattaccttcgtggggattgtaccactccatcttattgtcatcgcatgcttgaaagagtaaagctcccaaggcaataaccggtaatatattttttagtttcatactaatcttttgtttaatcattattattctgttacctcatcttccgggaaatccgtgtattccggactgtccataggtactatgcgtacattgtcgatataaattgttgcgctggatgctgatgacaggaattcctttgacgcatcggaactgttgccggtgactttatccagagtgaagtcggagttctcaaaatagaaaccgaaattgcaatacgaagcggcggcgcgtcgatccagcagaaactgataagtcagattggctacgtctgagttggtagagcaaatatagaacttgctgaatggtattgtaaccgtttgccatccggctgtgtagaatggtacagccttaccgtcaacaatccagggtacataattataacagtccttgttgtcgctggaagcccattcaccgccattcacgccatttactaagcaaattttgaggaatccgctgtttacccagggattagactccggaacatagatatcaaactggataccacatttggaaacgttggtggtttctgcaatgcctctggtggccgaggtccagtcgtccactccgttgcctgccgtccagacttcggctgtgcggttcttgccggctgcaaccgggacctgtttggcggcaggaagcattacgcatttaccgcggcctgtttccaaaggatcatttaccaggtcttccgggaaaatcatgctggcattggatccccaggaaccttgttggccatccgtatcaaaatcgagtataagtccttttctatggttgaaataagcgggagagtaagcaccgccgttggcgcattctattgccagagaaccactttcagtcagaccttccggaactttaaccgtgaagaactttccgtcttcatctgaaaagatatcaccaccttctactaccactccaccggggaaagtaactttggatacttcctgcaagccatcaccataaacaataattgtttctcgggcattgggtaaagtattggagatattagtgatgctcggagcactggaacgaatggtgaacggataagtcaggtcaccgctgtcttttactaaaacaattttattacgcacactttcatcggcttctatagtgggcacatctttacttacagttaccaggaatgagttgtcggacacatataccggattgaagtaacagctatatccattgatatatactcttcttagtccggtgaaacccgagccttctatgcggattaattgtcccagacgggcaaactccacttttctgtcgggaacgtttgaagtggcatcttccaaataaatgcctgtgatgtgcatttcggctttgtcattgtcgtcatcgtcacatgctgtaaaagcaaacgaacaaatgaggacggctaacagaacattcagtgcccttatcgtatagttgaaatatgactttttcatttgtatcatctttattagttaaacaaatctgtgattcggtcttccgtaaaagtgtatggaacgggagtacctttgagcaaaggattctgtacagtttccgattcaggatagggcaacaagaaaatactttcttttacggttcctatagagcggttggtggcgtctttggaactatcaatggatagagtctgcgccgttgcatcccagagaaccggaatgttggtgtcacgcatctgccccgtaatgtagttcatgacggcctgctgctggaaattagcccaacgaaccatatcataccagtattgtccttccaggcaaagttccagacgacggtcacggcgcaaatcattaaaagtaaacgaattctttaaaggagccagaccggcgcgggtacgaacagcattgtaatattccaatgctttatcatccgtacaagagacgttggtgccaagtgtcactgatattttggaatcgctgtcaatatctccagttttgttggcagtcagtgttagattattgccaaaacaagcttcggcatagtttagatacacttctgccaaacgaatcatgtaagtattgataggtgtatttccataactgatggaagcattatccttactggaaccgcatacatatttcttgcaatttagttgagattcggaatattcaacggttaagccgcctttatcgctcatcagctccggatagaaatcaccataggccatccaagtggctttccggcgggtgtctccttgttcatattcccagacagcattaggctgtgctactgtggctccaccccaggcgcggtctgtaccggtaacgtccgatccataggcaaaatagttctggatggtattcgattcaccataagtatcgctattggctacccactgcaatgcaaacaaagtttcgctattgttgttgttttctattttgaacaaatcagcataattatccatcagactgaagttcttattctctattactttcagagcagctttcttagccagttccagatattcggaattacgggtaccactgttcttattgtcactatatccggcgtaagtaagatatacgcgagagagcattgcaaatgcgctgtattggttgacacgaccggtggcataagatgtttcaggtaaatacttcgctgcatattccaggtcgcgcatcacgaactcaaatacgtctgatgcaggacttggagcaacaatcggattggcaaccaattcatctgagttttcgttcaagatgacattgccccacagcattcccagataatagtaagctacaccgcgcataaagcgggcttcggctatgtattgcggctttacactctcactcatgctgccaccttttataccgttgataactttgtttgcttgttgaactacaatgtaaagtgattcccatgcttgtaccagcggactggtcagaccgctttcattcaaatcggtgaacgggtagatataatcggagtagggggcgcgcagattatatccgcgaccgtctcccattccgtaatagaatttatcgttgaagtggaaccataccttactatataaaggagcggttgccgccttgcagtcttcttccgacaggtagaagttgtctcctgcaatgttagagttgtcctttgaatccaggaagtcactgcatccggtaaatagcaaggaagctgctaacacaaaagagcatatatatttatttgttttcataattattgaatctttagaaagttaagttcaagccgaaagtgtaaattctcggagaaggataacggtaattgtcaaatccggtcagcaaagcatcctgattggcagaaccgatttccgggtccatacccttgtatttggtgaacgtgtatacattttgtaggttgcagtacacttttaagttctgtatgcctaacggttgcatccatttgcgcgggaagttatatcccaatgagatggactggatgcggagataagaaccatcttctacataccggtcgctgaagcggtagttggattcattggtcttggttgaaccggacatacggcaggcatacttgtcgccaccgatgatctgtacattacggtaatcatccggtccgttggaattgattaatccgagctgcgcatagtcgagggcactcttcagcagattgttgttggcgtgcgagtcttccagttccctgcgtccccagttcacgacttcatttcctaccgatccgctcagatagacactcaggtcaaatcctttgtaagaaaaggtatttccgaaaccgaaggtaaagtcaggctcgggattaccgatatacgtacggtcctcttcgttgataacgccatcgccgttgatatcttcaaacatgtagtctccaatccatacactgtttttggcaatggtcataccttcgggaagggcaacgggagtgactactccgtctttcttgtaatagaaatcctcggctttctcaaagcgtccgataaccttatatccatagaactgtccaatgggctgacctacggcggtacgggtaaggatggtgattgtggaacctgtctgattggtcttgtctatcaaactggtagccgtatccatttccttcactttgttgcggttcatagagaatacgaggttgcttctccattggaaacctttcttgtcgatgttaacagtatttaaagtcaattcgatacctttattttcaagtgaaccgatgtttttccagggggcggctgttgcacccggactgcttgacgttcctacataagccggaagaggcacttgaagtagcaggtctttggtctttttataatagatatcagctataaattcaattctgttttggaacaagttcaggtcgataccgaagttgcttgaataggttgtttcccatttcaggtccggattaggagtgtttcctgccagcaagccggttccccaagtggtgggaagtgaagagtagatggcgcgataagcattgttcaccacattctgattacctacggcaccccagcccaagcgcactttgaagttgttgattatatcattgtctttcaggaatgattcattagaaactttccatgccagagcggctgacgggaaccagccccaacgattgtctttatagaacttggaagaaccgtcgcggcggatggtgaacgtcaacagatacttgtcattgtacgaatagaacatacgtccgaagtaagaaagaatggaactttcaccgctgttaccgttattggtggctttggtggcgtctcccagtaccaggtcggtcgatgcgttggagaggtatccggtacgggcgccatacaggtactcccatttgctctgctgcatttcctggccaatcatggcattaatgttgtgtacgccgaaagtacggttgaagttggcgatatttctccagctccagtacttgttgtatgatttggagaaagcgcctgtacgggtttcgttgacgatggctccgaattcgtacgaagggttgaacttataagtattggtgataccgtagtcgaaagaaagctctgtcttgaaagtaagccccttgataatggtggcctctgcatacgtattggcacgtatgttcatcttttcattgcggttgtcattgatcatggcaagacctaccgggttcgtttgcgtccactcgtccgtatcaggaccatcatagttgccgtctgcattgcgtacagctacgttaggcgattgcatcaatgctgttctgattaatgattcatctgaaatggtcagcttttgtttggattcgctgaacgcgaagttgatacccatcttcagatattctttcacttgggaatcaaaactgccgcgcaggttcaaacggcggaatccggagcctattgcaataccgtcttgttgaagataaccggctcccattgcataattactcttatcgttaccaccggttaccgagaggttgtgactggtcatcagtgctttggaaaacatttcatcttgccagtcggtaccattgcccaacaggtcggggcggacaaaactattgtctttgttcacaataccccagtcctgacctgcatagtccttgcccgaacgtacattccggtgctcggcatactcgcgcaggttcatcatatccagtttcttcggcatctcctgccagcctacataaccgtcgtatgtgatgttcgctgtaccggcttgtccgcgtttggtggtaatcataatgacaccgttggcagcgcgcgctccgtaaatggctgtggcggaagcatcttttaagacgtccatggatacaatgtccgatgggttgatggatgccagtgcgttgtcgcttcccgagccggtggagttatctatgatgactccgtcgataacaaaaataggttcattggatgagtttagtgaattgacaccacgaatgcggatagaggaactaccgcccggcatacctgtgttggcctgtacctgtacgccggccgcgcgtccctgcaatacctggtctatagaggtgacaactgatttcttaatggcatcttcatttaccgataccaccgaacccgtcaggtccgaacgtttcatctgtccgtaacctactacaacgacttcgtccagcatctcagtgtcttccttcatcgtgacattgatttgtgtcttcccggctacaggaatttcttgtgtcttgtagcccacaaatgaaattacgatggtactgttggatggaacattcagtgtaaagttaccgtcgatgtcggtaataataccgttgctggtgcctttctgcactacgctcgcaccgataaccgattctcctgtggcgtccttcaccacacctttcacagtgatattctgtgaaaatgcccatagaggtatcaggcataataagaatagaagccccaaaggcttaaaacaataatttgtgcatttcataactgaaattaatttagttggataacaataatattctctttccttaataaagatgtgaagacatgtttttcattctcaagtttccatatttgcatttatcagattaaagggttaaacattgctttttcgtttgtgacaaaggtattctataaaaagaaaaagcggatatttaattgtagcctgtgttacatttaaatgtaacatgacttttctctgtgttacaaaatcattcgctggtgttacgtcccaggtttgttgacgtccgaaagatagagaattaagtgataaatcccatattcctttcacttatatcatttattccttttatccgcatcaataagagggctgatgcaaaaggtggcatcttttgctgtaaaagatgccatcttttgtatcattagatgccacctttcgatgtaaaagatgccatcttttgcaatagatgtataaggcttcctggcaaaagggtttaatgttccgctcctttaggtataatgccgaagagataaagagcatatatgcaatggcttccctgtccatttcgaaagtttttcttatctttgcttgcctttaagtataaaatgcaatgaaaacagctcttaataaaatcctccttatagtcttattgctatgtttgaccgtcctgcctttgacggcacaaaccggtaaattctattctactaacaacgaattgtccagcagtcttatcaaccagatttttcaggataagcgcggatttatctggatagctactgagtacggactgaaccgtttcgacggacttcgtttctccaactataagcatatatccggcgactccacttccattaaaaacaattatgtacgcacgctttttgaagacagccggcagaatctgctggtaggttgcatcgacgggttgatgaagtatgattcggaaacggatactttccgggagattccaatgatacgcgcgggcaagcgggtttttccacacatcacgcagatgcagaaattgcataatggtgagatctgggtggtaactaccggacagggtattttccgtttggacgaagagaagcagcaggcggagtccattgacgccatcatgaggcaagtgaattataacttccagtcgaatttatacgaagattctgattataatatctggattggtacggaagggcatggattgatttgctatctgcccgctacgcaagaagtccgtgtgttcagatatccggtgattaatgataactatgtgtcggctattggtgaagataagtacgggaatctgttcatcggtactcaaaagcatggcttgtcccgttatgatcgtgagcagaaccgctttattcctgttccctatacgggtagcgaggaactgtccatctattgtctgacgctggtggacgaccgtctgttgataggcaccgacggccagggactgaagacttacaaccggatgaccgggaagatagaggattatagcatcaattccgcaccgctggatttttcggaaggaaagatacacgctatcatggaagaccgggacaagaacctgtgggtaggattgtttcagaaaggcattgtactgatgcccaagcaggagaatccgtttgagtattatggcaacaggtccatttattataatcccatcggacaaggatgtgtaatgtccatctatcaggatagtaaccgtcacctgtgggtaggggcggacaatgagggaatctttgaactggatgcggaaggaaagaggctgcggcattatcagcccggcaataacccgcgttcgatggctaatacgattatgtgtatgtacgaggatacgaacggagatttctggctcggcacgtacacccggggactggcaaaactaaaccggagaaccggtgagtgtgaatatccgctaccggtggacaatgagaagattttctcgattacggaagatcggcataagaacctttatatcgctactttcggttcgggtttctaccgctataatctggtgacaagggagttgaagcattatgagtcgtctaaagatgagtcgggcgacctgacccggaatgaactggcaaatgactgggtgaactacatcttctgtgatagtgagggaatgatctggctgggacactataaaggtatcagttgcttcaatccggtgaatgagagtttcattaattaccgcaatgtgaatactctgattgaagaccgggtagggtatgttttgcaggaagaccatgccggaaatatttgggcaggtacgacggacggactttatcgcttcaataagaagaccgaagaactgacctgttttacggtggcggatggtttgcctaataatgtaatctgtggaatttgcgaagacgaggaacataatatgtggatcagtacctatatgggtatctgtaagtataatgtcgaaaacaatcgttacatcaattattatgcgggcgacggattgcagggaaacgagttcacgcacggcgcattctataaagatcaggcgggaaaagtctatttcggcggtataaatggtattacctatttccagcctttatccatagggagtgtgctgaaagacaccaaggtctggattacggacttctttatcttcaaccagcctgtacggaaaaatacgcgttcgggaaggcataccgttatctatacgtctgtgccggatgcgaatatgttccaactggctcattacgataatacgttcagtatcatcttctccacgttgcagtataacaatccggagcagatatcctatcagtataagattggagaactgagtaaccagtggctcagtaccgagccgggtgtgaacagggtgacttacaataatcttccgccgggcaaatatactttccatgtgcgggcgctgagtcacggcaatctttcggagatacgtacggttaagattctgatcactccgccttggtatgagatgtggtgggcgtattgcatttatgtttttctgctcggcttgcttgtattgggcattgtgaattacatcctgtcgcgtatgcgccatcgccgtgaaatcatgaagcgcgaacatgccgaacaactgaatgaagcaaagctacagttctttatcaacatctcgcatgaaatacgtactccgatgacgctgatcattaatcccctggagaagttgttggccgaaaagaagggaggggaagtacaaaagacttatctgatgatttaccggaatgcacaacgtattcttcgtctgataaatcagttgatggacatccgtaaactggataagggacagatgttcatgaagttccgtgaaacggatatggttggtttcattgatgatgtgatgcttaccttcgattatatggcgcggaagaagaagatacatttcagcttcgagcacgctatgccgcagttgaaggtatgggtggatatgaataacttcgacaagatattgatgaatatcttttccaatgccttcaagtatacaccggagcagggtgaaattacggtttcgctttctaccgggcgcgatgctacccgtcgcgatcctctgaaggaatattttgaaataacggtcacggatagtggtatcggactcgaccgggagaagatagagcgcatattcgagcgtttctatcagatagataatgatgtgacgaaatcgaatttcggtacgggtatcggtttgcatttgtcccgttcattggtggaactgcatcatggcattatcttggcagagaacagggaggatgctccgggtagtcgtttcgtgatccgtattcctttgggttcagcacatctgcgtacggacgaactggaagatgtggaagcactcatcacccctcatgccgtgctggttaagccggaaaagacggacttggaggaagtctttgaagaagaagagggtgaagaggatgaggaaggcaagaagactggtaaggcaaagaaccgtatgcgcatattgatagtggaagatgaggaggagattctttcttatctgaaagaagaattggaaggggactatcggataatgacccggaagaatggcagggaggcttatgatactattcttgcagatactcctgatttggtaatcagcgatattatgatgccggaaatggatggtctgtcactttgccggaagattaagcagaatacgaatgtcaatcatgtgcctgtaatcttattgactgccaagtcgaaacccgaagataccatggagggaatggcaaccggtgcggatgcttatatggtgaagcctttcaatacggagctgctgaagagtacgattgccaacttgcttgctaaccgtaaactgctgaagagtaaattcagtggtgcgcaacagcaagaggacaaggtgcagaagctgagcatgaaatcggcggatgagatattgatgagcaagataatgaaggttatcaatgagaacctttccaatccggatctgaatgtagagatgttggcggcaaatgtcggtctaagtcgcgtccatgtacatcggaagctgaaagaactgacaaacctttcggcacgtgattttatcaagaatatccgtttgcaacaggctgccgcactgctgaaagagaagaaactgacagtttccgaagtagcttatgctacggggtatacgaatctgtcacatttttccagttctttcaaggaggtgcatgggatgtcgcctaaggagtatatgttggcacatcaggggtaggttttaggaatttatttattatggatgggttatgagggaaagttgacgagttaacaagttgacaaggggacaaggttccatgcggcataggagcattgcgcagccccttgttcccttgtcaactcgtcaactggtttccttcctttctataccgttttgctttattgccaactttcacttacgaaacttgatttagccactccttttagtaccacattattaatatttacctgtgccgcttgtgcatcggttatcacttctttcttggctaatctttccgcaatcaggcggaagtagccttcctggctttcttgcagccgcccatctgccgtaaatgagtttttgaagtgtttcggtttaggaacgatagaagccaggaaaatactttcttctaaacttaactgtgaggggcgtttgttaaagtagaaagatgccgcttcgtggatgccgtaaaccataggcccccattccgctatgttcaggtaaacttcgtacatgcgtgccttcggagtgaggtgctcggtttcgatgagccagacgataagcgcttcttccagtttgcgggcaatgtttttgttacggttcaggaaaacattcttcaccaattgcatggaaatcgtgctacctccgcgggcaaacttgcgaacttccaggtcatgaatcagagcttctcgcatggcatccggcaggaatccccggtgatagaagaaagctccgtcctcgctctgcatgacagacatttgcagcagaggagagatactgtccaagggtgtgaaattctcccatgacggaccgacagggaaggtgtatacgggctgtccgttctcgtacgctgtatagataaactcatcggacatcttacctaaatccgtttttccataatggagaatacggaaatctttttctttcagttccgactcaaacttcaaactatccagttgagagaaatccacgtccaatagaaagtgataagctaattgtccggtagtgccgagaccttccaggttttcgaaaagtcctttgggcaatgaaccgaacaactcttccgaagggaaccagggtttccggacagaagctataaaatgccactctttcttgtctgtactttttccgatacgttctgcctttaaataaggatggaaggtcagtgcattgaaacgtacaaggctggtactgtccagttctacggcttgcggactgacatttacgtggaaatccagttgtccgcgatccaggttgatcgtctcgggtgacaaccgcttatgatatacctgcaatccccgtacttccgactgaccaaccagacatgtaagcccgttgttagttttttcctgtgagaagttgcacgtcagactgtcgaactgtacttctgcaccgaatcggcggtggatataaggaacagtcagttgtggagcatgtaaagttgcatgcaatcgcctttccgaaggattaaattctccttcggtattccattgttggttcaggctatcttccagaactgttatttctgattggaaatgatagtcgtcaatcacaaagcggggaatacggaagctgacgaaattacggtctttccgctcagtgattgtaagatgggtgagttcaccgtttccgggtaataggccgaaaaggagatttaatgttgtattgatgcgacgggtgtaatcggtactgatattgctttcattggaggcagttacttcggaagagggcaggaaaaggaaatcatagttggctgtagagtctttttttatgaaattgagtgagagtccgtccaggcggacttctttgatcttgatatctccccacagcagtttccaaagaccgatacggatattgagagattgaagggaaagcaatgtatctcttttctgtggaaccacattcagtccgtcgatagagatcgtattcaaccccttcatgtggagtttgttgtaactgatgtctaatccgtaacgctgttccaatctggtaatgcgtttatctgcgatatggcgcagtaggcttccccggaagatgaaaatacctgttgataaaagaaatagcagcatgagacatgctactattactttggttatttttcgttttatcatactctttacttttcgggcgcaaaggtatggataaaaatgtaagttgctactcttggagcctaaaaacagtaatcatttgcttcctttccagatggagagaactttctttcgtatcaggaggatgtttaaagcggataccactataaataagatacttccggcaaggatacagggcagaagagagcctgtttccagttgtggaataagagtttgcaggactccggtgtagtaagatcttaaccagactacaccaatgacggcgaggagcagtaccagtaaattcaagcctacggtcaatacatgatagggcaatgcgactttagaaggactgtaacctattaatagcaggttttctaactttgccgtattcttctgaagcagcaagaatacacttaacatcaggatataaaaagacaagatactgataaatagtcctactcccgaaacaatgcctgtgatgaggcggaggaaataggttgtttttccggcatccagattgtctccttcggtttcatagttcttttgttggaagtagtcggtgatggctgtatctgtggaattcttcacttccacgatgaggcgggagggttgcgcttcccgttcgggggcgaaattctgatttgcccactccataaaagattgaggaacaaggatggtattcaaccggttggagaaaccaacgatatttcctttgtattgttctacatgtccgttgccacgcatgttgatatccatttgtatcagtcccatcacaccttccgataatttcggcaagttgcggctttgcgcaaaaccaaagttgtaaaggttcagataattgcggggaatgatgataggtatggtttgtgtaccttcatcaaagtgccacttgtccaggctgacatcgacaaaagcatcgggaacagattcaaaaaacatatccgtagaaatacggataccggcctgttgcattcccaaccctgccgacactttgaaaagggtaggtgtgaaggcgcctacgctgcgtgtaaaaggttgtgcttccagttctttgatttcatctttggaaaaagtattgctttgtccggtaatgctgccaagagtgctgatctttttggtagcgatgatataatccttcttcatgaaactgtctccctgtgtgaagacgggaagaacatccttataaaattgcacgctcaacagtacaatcagcataccgaagatgttggcgagaaaaaagccacttaattgtccgatgctgatgtgctggcgaagaagtttccaaacaagcttgttcattgaaattatcatttatagtttcatcactttattatattctaattctatatgttttccaatggaagtaacaattattcctgcgccttgccgttcggcttcttcgctcagcatgcgtcccataagtgtgccgttatcatcatccaggtggctgataggttcatccagaaagatgaaatcgaacggttggcagagggcacggatgaaggctacacgttgctgttgtccgaaagataactttccggctttctcgtttactttctcagcgataccgagtgtttcaaaaagtgcaaggatttcttttttcttcttataattggtgagtcggttcttcaactgaacgttctccaaagccgtcagctccgggaaaatgcgcagctcctggaacagcatgctcagcgaatgtttccgcagttccacccactcatgaatggagagcgaacggatattgcgttcatcaaagttgataataccttggtaatcgcggcgatatccgtagatatagctgcacagagaagatttacctgtgccggaagcagcttctatcagataacgctctccttttcgtagcacaaggtcttgatgccacacgtcggatgtgatggcatcccggtcggcaaacacttggggaagtgtttgcctcagatgaatgatttccattatttatcgggattagatgcctgcaaaccctttgatgaagtttacgatctgtttcaatgcatttacatttttgtctttcagctgaatgaccatgtctgcatcattattggaattgccggttgcttctacataagctatcttatcaaccagagcaaaagccgttgcatattgtgaaccaccgtattccgacagcattttcacaatcggcaaagcgagaaccgcttctgtattaataacgaaagcaccattcttacctttgatattagatgcaaattcggtatctttaattgaaggattaactgttttatctatgctcttgtacaacatttcgtcattcgtagcatacaagctattattgcggacaccaaagaatatattcagcattctggacttatatacatattcgttctcacccagtttcaggatatcttctccacgtttcaagcccagttcattcttcttttcatacagtaattgtacgggtgtcgcactctttacgctggcgtacatcaggaaagtgggagcattgtccattgtgaagtttatcagtcccattgccatatctttctggaatgtgccgaacaactcttttacttcattggccttggcaatggagaagttcttttggaattgctcgttctccagtagcaggttatagaattcctctccgttgatacctgcgctgatatacatcagagtcgatttcgggaaatatttcaggaaagtattctctatggggcaggttgctttcttttgcttatcgaacaaggcttgcagttcaggactttcagtgaagttttcatatttcatgctgatcttacctttttcgaaagaaagacttcccaacatcttcagatccttcatgttaaaaggcatatcactttctttgatcatattggcgtaaggacctatcaggcttgccggagagagcatagcatcgatatccccacccattttctgcattttcttgaaaacggcagttgaaacaatactgttttcattggtctgtttcagtagtgcaggaatatcttgcttgattttttcaagttgggtagtacctttgtaattagttagcataagtactgaaggagtgtatgccatgaatacttgattacccatttgcgtgaactgaaagccatctccacttgccaggggctgacaaactttctctttctctaatgtttccagcagcgcgtgcaggtcgtcctcgttgctgacttttgcaattacagtagtgggaaatgtctcagtattgaaaacgtataaaggtgccgatacgtcgattcccgatttcttcggatctttcataatcatttccacttgttggaatgttgcggcattcatgccactcttcatagcatccgtcagcttttgctgcgcttctttgttctccttgtcattgagccctgctttatcaaccaatgatttcatgttgatactgactaccgtagaggcattggcaggaataacattcgtatattcgaacttcttctcggaacatgcgctgacaagagctaccactacagccatcaacgccaaacggggaaacaaacttttcttcatacaattcttattaaaatgtgattatcattgattttgcaagttcagtgtatggcaagccaccagagcagccgtctctgtgcgtagcctcgacttacccagactgatgggagtaaagccgttttctatagccttttgtacttctttttcactgaaatccccttccggacctatcaataccagtgcatcttctcctttgcggaacacatctttcagcagcggcttttctccttcgtaacagtgcgcaatgaacttttgccctttgaagggctgcgtgatgaacttattgaaatccgtcatctcgttcagttgtggcaaacgtgctttgagggattgtttgatggcagataccaatatcttgctgatacgctctgttttgatgactttccgttcagagaaacgacagttcaggaaagtcagttcatcgaagcctatctcagtagctttttctgcaaaccattctgtacggtccatattcttggtaggggccattgcaatgtgcagatgcccgttccataaaggttcctgataaatggtttccaggatgtttaccatgcaacgtttattggtggctgcactgatttctgcgcgatagaaataacctttaccgtccgtcagcgtaatctgatcaccgatattaaggcgcagtacgcggacacagtgctgggcttcttcttcgggaagttcggcacgggtttgtatgtcgggtgtatagaatacgtgcataagtttattactgttcttttcgtttggaaatttcatccctgatgtgggcggcgcgttcgtaattctcattggctatggcttcctgcaaagctttttgcagcatttccattgtatctccatggaagaattcatcttcgtgtggagaaggattctctcccataggagctatgcttcccgcttcgctttcctttccggttttaagttgttccgactccagaatttcttcgtagataaagatcggagctttcatccgtaaagccattgcgactgcatctgatgtacgggcatccatacgaatgatagcatcgtctgctttcagatagatataagaatagaatacaccgttgtctaccctgtagataagggcacgcatcatgtttacccctaatacttccagacatgaagcgaaaaggttgtgggtcaacgggcgtggcggaacaattcccttcaggctgattaacatcgcttgtgcttctgccgcaccgatgataaccggtaattgacgggcaccgtccacttctcccaatacgagggcataagctcctgcctgttcctgactgttggagatgtttagtacttccagttctatttttttctttttatccataatctttttccgaatggcggcaactgccaaccacttgcttacttactttttatttactgcttcttccggccggtgcttgtacttgaacaccaaggcgaacaatataccgatgaccagtgcgtaagcagcaaaaataatccaaatctcaggccactcacgacttaccagtttgccgtcggcgtatactgagaaagcatctactacggcaccgctggcgtatcctccaataatggcgcccaaaccgttggtcatcataaagaataatccttgggcactggcgcggatattggaactggtttcttgttcaacaaacaacgaacccgaaatgttgaagaaatcgaatgccatgccataaacgatcatggataggattaacatccacaaaccggatcccggatctccaaagccgaacaatccgaaccggaatacccatgcaaacatactaatcagcattacctgcttgattccgaaatgtctcaggaagaaaggtatggcaagaataaacaatgtttcggacatttgtgagatggatagcaggataaccgaatgtttcacgccaaaggaatctgcgtattccggaatactggcaaaactacccaggaaaaggtcaccatacgtattggtaatctgtaacgctgctcccagaagcatggaaaacaagaagaaaatagccattttctttcttttgaataatacaaatgcatccagccctaaagaagaaagcagtgatttgtttccggtcttggcaggtttacatgccggcagggtgaaagcatacaggcccagcattaatgcagatgcaccacctacataaagttgggcgcttgaattcttgaatcctgtaaggtctaccgcccacatcgcacagataaacccaatggttccccatacgcgaatgggtgggaaatccttgatcagatcacacttatattgttcgagtgaattgtatgaaactgtattggccagtgataaagtaggcatatataccaataaattgagtaacattgcccaatacatctggtcatatcccgtagcggtagaggcatagaaaaggcatgcggctcctataatgtggcaaagtccgtataaacgttcagcattgaaccatttatcggcaatgataccaatgatgccgggcataattagagaggcaatgcccatggttgcgaagattgcgccgatttggcctccttcgaagtgtagttctctacccatgtaacctcctaatgaaattaaccatgacccccatacgaagaattgcaggaagttcatgataatcaaacgaacttttatactcatgacttttctaatttgtgtgttttcttttcacattaaataatagatgcaaatataatattttcgttgattgcgtgagcaagttaattaataaaaagcgcataaaagtgaagaaaggtgaagaatagatgatgaaaagcggaatggctaagaggtatataaaaaaagaaggctatctatcccagacagccaatctttattaaccttaaatctaataccatgaaaaacacagtgcaaatgtagaggttttatgttatacaacataacgttttactgattttcttctttggtttaacatcttttagattataagacggcttttgtcccatttatgagagagtaaagtgcatttttggcaaagatagtattagttaatcttctatcccttgcttacctttgcttcataaatcgagaaatgatgaaaaacagaatcttattgactgctgcgttatgtatgagcatgatggcagagattactgcacaaggttacacttctttgcgggagcaaatccagttagcgggagagtgggagagttctttaggtacctgtcgcctgcccggtacgacagatgaaaaccgactgggtgaaaggaaccgagatacgctggtgacgtatcagttaacacgtctctatccttatagtggtaaagtgatttatacccgtgaaataaatatccctgagagtttccggggtaagaaactgtttttgatgatggagcgtaccaaaccaagcactgtgtgggtagatggtgacagtatcggtagctatggtcatctgtatgcgcctcaccggtatgagctgcctgccctggcagtagggaagcatcagctgaaaatcaggatcgataactcgccgacttctgtccctaaagaaatacagggctctcatgcctggacagatgctacgcaaacgaattggaacggcattctgggagaattttatatcgaggcagttccggtttcttatatccagtcggtgcaggtatatccggaagtggataagaaacaagcattagttatagtggaagtcgatgcggacaaagacggaaaagcgatactggatgtcgatggatatgcctggaatacttctgaaacacataccttgtctccccagcaacttgccgtgcgattgaagaaaggacgaaatcggattgagcttcctgtgaatatgggtgataaaccattattgtggagtgaatttcatcccgcactttacaaactgaacattacgctccgtgccgggaaaaaccgggatagccgaatggtagatttcggtatgcgcaagtttgaagtggagggtacgcaatttgtgataaatggttataaaacttttttgcgtgggaaacatgatgcctgtgtttttcccctgaccggttacggtccgatggatgtagcgtcctggcaacgtgtattccgcgtggctaaacaatacggtattaatcattatcgctgtcattctttcactccgccgcgtgctgcgctggaggctgccgatatagaaggtatctattatcagattgagttgcctttgtgggggtatatcaagcgtgaaaatacggtcctgaacgattttctgaaaagggaaggggacatgttgctggaacactttgggaatcatccttcatttatgatgctgggtttgggtaatgaactggatgcggagatagatgtggtgcgtgaatggctcgatgatttccgtaatcaggataatcgtcatttgtattgcttcggttccaataataaccttggttggaaaggtccgcaggatggagaagatttctttgtgacctgccgtgtaggtggtggagacggatatacgactcatgtacgtacttcctttgcgtacgtagatgctgagaagggtggcattttgaataatacgcgtccggctacggataaagattattccggtgccattgcgcactgtccccgtcctgtagtggggcatgaaaactgtcagtttcaaatctatcccgattacagtcagatagagaaatataccggggtgcttcatccttataatcttgagatttttcgtgatcgtctgaaagagaaccatctttcttctcaggcaaaaacttttcaccaggctaccggacacttttccattgaatgttacaaggcagatatggaatatgctttccgtactcccggttttggtggcttccagttgctcgatttgcaggattatcccggacaaggttccgcattagtggggattctggatgcttttatggatagtaaaggtatcgttgcccccgaaactttttatggtttctgtgcacctcttgttcctttggcattgatgaaggatcattgttggctgaatactcagccgcttcacatagatgttgctctttctaattatgtggaaggcgattggaatgagcctgttcgctggagtttagtatctgataatggggtatggaaacgtgatggagtactcatggcctccattcctcagggcaaagtaggaaaggcgggcagtattgatctttcactttccggactgaaagaagcccaacgcctgactctgacattgaccaccggtaagtatcgcaactattatcatctttgggtatatcctgatgaaactgccgagtcggaaggttctgttcatgtggcttctttcctgaacgatgatctgcgaaaaaggttggaaagcggagcgtccgttctgttgattcccgatcatgatagtatcgtagcacagagtgttggaggaatgtttacccctgattactggaattactctatgtttaagactatttcggaaaatgccggaaaagaagtttctcccggtacactttccatattgactgatcccggacatctgttattgaaatactttccgactgaatgtcacagtgattggcaatggtggagtattacccgtaattcccgtcccatgatactgaatgcaacccgtggtgagtatcgtccgcttattcaggtggtcgataacattgagcgcaatcataagttgggactggtctttgaatttgctgtaggaaagggaaaactgttagtttgcatgaccgatctgcaagccattgcagggacacctgaaggcaatcagtttcgtacatccttgcttcggtatatgaagtctgatgcttttcaccctaccgaacagttggcctggaaagaactggacgcactcttccatgccgatatcaatcaaagacagattattggggtgaagaatgagtcggattatacagtaggaggggaatagaacgaagagttttgaaaataaaatgttcgcaatttagtgaacattttgttttaaatgtctatctttgcaacgaacaaactactgcttatgttagttacatttgataaagaatatctcaaggaactctatgtttccggtaaatgtagtgataagaaacatcgttttcagccggatgtgataaaacgatataaaaggtgtattgatacactgattgtatcgaagaatgctgaatccttatataagcacaactctttgaattatgagattttggtgggagacaaggaagggctttcttcaatacgggtaacttcaaaataccgcatagagtttactgtgagagttgtagcagatgctgaaacgatcataagtatatgtaatgttatagaattgtctaaccattataaataagtagagtatgactatgcttgcaaatgaactcactccgttttgccctacgcatcccggtgaaatattaaaagacgaagttgaataccggaagatttctcagcgcgccttggcacgccagatgggaatttcgtattcacaattgaatgaggtgctgaacggtaagcgcccggttaatacggaacttgctttgctttttgaagcagctttggggcttgatcctgaaatgttgctcaatatgcagacgcgatataatatgcaggtggcgcgtgccgatcagcgcacgcaagatcgctggaatgaagtacgtaagttgtgtgcatcgttcctttgatgcacacaactgtatctgttatcagaggatttattccacatacagtaccaaccctttcaggtattctccttcggggtggtaaatacttaccggatggtcagccggttgcgtcagttggtgcagaatacgcacactgcgacctgacattgcggcagccgtaaagaccgctgtgcggaagttttctttgctgacagcttgtgagcaggagaaagtgaatagaatgccgcccggtttgatcttttcgaaagctttcacattcagcttgcggtaaccttgcagcgcattgcgcagggcatcgcgatgtttggcaaatgcgggtggatccagaactatcaggtcgtactggtcgcccatacgatccaggtatttgaaagcatcttcggcaaaagcggcatggcgggtgtcaccggggaaattcagttctacattcttgttcgtgaggtcaatagccttggcggaactgtctacagaatgtaccagttcggcattaccacgcataccataaacagagaagccaccggtataacagaacatattcagcacagaacgtccgttagcatagcgttccagcagtgcgcggttctcgcgttgatccacgaagaagcccgtcttttgtcctttcagccagtcgatatggaattttaagccatattccattgccacattatctgtgctgccacctttcaggaagccattctcagggtagaggtcggctttgaaggggagagtcgtttctgatttataatagatattctctattttatcacccatcacttcactcagggcattggctatttccatgcggtcgaggtgcataccggcagagtgtgcttgcattacggccgtgcgggcataaatatcaatgatcaagccgggaaggttatctccctcgccatgtaccagtctgtaagtgttgttagtcggattttcagcaataccaatgctgcgacgcatctcataggcaatactgagtttgcgtttccaaaaatcagaatcaatagcttcatcttgatgaaaagaaagcacgcgcacggcgatgctgcctatttggaaatgtcccttggctatgaattccttcttggaagtgtagatttcaactacttcaccttcttcgggttcaccgtcgaaatgagcgatggcacctgaaaatacccagggatggaaacgttttaatgactcttctttgccggatttgagatatactttgtacatgcgattagtgattagcgattatgggttagtgattaatgattcttggttggtaagcggttcatccggttccaattcatagtcaccggtaacttttaattcctgtaatcggttgtatatgttgaggcatgcccatgcatcggtggctgcatactgcttttgaggttcggtcagatgctcagcttcccagttggagagacgttgtgatttggatattttctcaccgaacaggataccatagattttttgcagactcttgtcctgtatgccgaacatacggacatattcttgcaactcgatgcaggaatgttgttcaaaaggagcgcgcttgtgcagcatcataaagtcgtcacgcagcgaaaggccgactttggtaactgacggactttccagcaatgaaataatcggaagcgtcaggccggtaaggttcaggcggaaaaggaagcagtcttcttcagaggatacttgcagtaaggctaccttatgtgattgccctttggtgaatgacgggcgggtttcgctgtcaattcccaacagagaatacttcttaagataagtcactgctttttccgcttcccagggggtttgtacaagatgtattcgtcccggaaagagtactttgggcatctctttgatatcttcctttttaatcgtttttttaataaccataatttaagtctttagtcgtgatggtgatgtccatgacagtggcaatcatcatcatcgcagtcatcttcttccggttcgtcttcttcagactggcggtattttacgtcgtgcaatgcgcgaagtgtgtttaccagggtttgcccccagtattctttgaactgttcctgacagatagccagggagtcgttcattgtttcgttcaatcccaactggaagacgaaaatgaaatctttgatggcctggtaaatatctgccaggtcttcggaaatattcttcttgatgggctggtcgctataaaccatatcttgtatgaacacgtccagatagtcatctttttcggcaagaatcccggcaaggttgatgcggagcacttcatacgtttcttccgttacgtagctttcaggagcgtcgtcgcctattatttctgtttcgggcaacatggctgccttgaggtagagcaacggaagtatctttaatgaggtatcgacaaatgtgtcacgtttcatcgtttccgcctgctccaggaatttgcagaattcagcagctacggtgacgaattccactacattacggtcgaatatcacttggctttcttttttcatatatactcggtttgaaacgcaaagatagtgtaaaccgagtgcagtagcaaatttatttgcattttactgaaatgccgtttcatttattattacgtgatattccgttccccggtttcttctccggctactgattccaagtttgcgaagtgcacgtccgaagtacgcgactttgttgatggctaatcggtctttggtctttttctggagaaaagaaagtatttccatcggtgtcatccacgttccttcgtcttctgtttgtgccgcctggaagtggcataggaagagttgttccaatggagtaggttgttcaaactcttgattgctctgcttcagaatggcttcgtcggtgtcgtccagccagtagcgttcaccttgtgaaatggcagtcatggcctgggcatagagttggcggtagttgatagtgacgttggtgttgatgggaccggttacttcgatacagatgaagcggcgactgccgctgggatcggtcagcaagtctttttgattgctggtgcctatgaaggaggcgtagcggcgtatctcctgaatggcggttccataaggttttcgcaggttggctacgggtttttgcaacagatgtttcaggaaaccttgctggctgacgctgatctggtcgaactcgtcgatgttgatcagaaagaaacgtcccaggcttcgttcggcatcctgtttgcttttgaagtcgatgctgtctgtgtagccgaaacgcagttccggtggtaaaagaatgcggcaaaacgtggattttcgatacccttgggcgcctaccagtaggggcgatgtactgttgccatgctgccggtcaagtccacgccaatgagctgtcatactgaggaaccagcggtagaataattcccgccaatgcggattttcgcagggaacgaggtcggccagggcacggatgcggtcttttccgtcccagcgcccggtgtcgttgaggtattcttctaccggattatggagggggatatagtcggaagtaaggtagcgtgctatgtcgcggtcccatacccggataccttcttttagggcattgagcgctatgctgcttcgtatccgctggtcggcggggcggaattggaagtgtatggagtcgcgctggcggtattccagctcgcccaacacggtgttgtagcggaattcgtagcggcggttcatgaactcttccaggcggaaggctgtgtcctgttcggcggtcatgctgttgcgggtgccgaaacctttacattcacggtaaatattatgtatggcggcacgtattacgggctcgtccgcttcgcgataataatgcatcagggtttgccggactacctcttcctcggggatgcctgctttgtaacagtgctcggcaagccgtgtcagtaacgggcgtaggtcgtcaccccgcttccagtttgtcagtccgtcgaatgaacggtttagtgccgcttcaaagagcatggaaaaggtgtccgatgaactataaccgggctgcatacgcaataggggattggtttccgcttgcttttgttccttgaaggtggtttcgccgggtatggcaaagggctgttccaggcagaaggtggtggcggcagggttgtagtaaggttgctcgtccagcgtcatgcggcaactttggttgagcgacggttccttcagggtgatggagtagggcaacagaggttggtaacagttcactgcgaggcggtaggcgtgggcatgaaacagggccatttcactttcgcgcttgggcagtgagccgtcgggcagggcgaagagtacccatattttgacgctacgtccgctgcttccgcagaaggcggcaaaagtctggggtaatagggagacttgctgttttatttgttccacttcggtgctacctgtcaggtggttgacttcaatctgcaccagcccgttgtaaatcttcacccgatgttctccgtctttggtacgggcatattccacggcggggtagatgcgaggcaacttgtctatgttctggtagtgattattggttccttgcagtatggggatgagatggcgcagggctgatacatgcgctgctttgttctctttctttatttttgctatcaagttttcagcttcaagggtactgaaagattctttaccggtttcacggtcggtgcgtataagggttagtttcatcgtggttatttttagttactgttttcaaaagacggcgcaagttacggcaaaaagccggggacacaaagtttttctttattttttatgtctcttacaaaaatacggtttcttttttatctgcaaactacttctctccatttatattcttccatcttcatccttcgtttcattcattaaatacaaggatgcagaagtacagaaaaatagatgagtataaacgcagaaaacttagtttctttgtatacaaacctgtagtattaaatattctctagctctttctttgattaaaacatcaccctttccttgcttttgcattgctttttctttatctttgcatttgatattttggcttgtccacagccgtgaatcttgtgcttcacagtcgtaaagcagcaacaccacaactgtgaagcacgcgattcacagctgtgggcaagccaaaaacattgcttgccaatgaaagaaacataagagattaacataagcaatccctgctctgaatatcactgaaagcggggaatgcaataacaaaagaacaatggcgatattatttgattggtacgagaatccaaaaaacaaagagcgtcagaacgaagaactgaccctgcacccgcgcatccggctgaacggctccacggacactgccgcgttgcgaaggttcatacaggaatattgttcgctgaccgaaacggatgttttggccgtgctcgatgccctgtcgcacttcatgggacgggaattgggtgaaggacgccaggtgcacctggatggcatcggctattttcgccctacgctgacctgcactgaaccggtgaaggtggataccaaacggaaaagcaccaaggtaaagctgaaaagcatcacctttcgtcccgacatggcactgcgaagcgaggtaggcaacattaaagtcctgccgctgaaacaacggaatgtattgcaaaagccactgaccccggaagagattgacaaacgactggagaaattcttcactacgcacgactttatgacgaaaggcgacttctattctctcaccggaatgacgagaactacagccacccggcatattaggcgtctttgtgatgaaggaaaactggaaaataaagggttgcagaaacaaccgatttatgtgcagaaaaaggcgtaataggaagattattagcggaatatgcgtgtttgtatggagtgtaggcaaattgcttgcactttatttatatttgctgccaccaccgctgtgttgccgatgaatagggagatgtaaagcatgagtgcaagcgtgcaagtaaaagtgcatataaactttttgtacgctgcacctggctgatgcctctctccattcagagaatctttagaagactaaggttataaagagagcaatatttttattacttttgcaccaatctatcattcatttactaaggaattctatttcatggctaagaaaaattctacaaaagatacagaacaatccctttccctgtttggtaaaataagggcgatcttcaaaaatgaaaccattcactttgttattggcttggtactggtcattttctctgtgtacttgctactggccttttcttcgtttttctttacgggagcggcggatcaaagtatcattgattcgggtaatgcacaggaattggcttctaccaataatggggtgaagaattatgccggttcgcgcggcgctcaattggcaagttatctgataaatgactgcttcggtatttcctctttcttcatccttgtattccttgcagtggcggggttgaagttgatgcgtgtacgggtggttcgcctctggaagtggtttatcggttgttcgttgttgttggtttggttctctgtcttcttcggctttgcctttgtggagcagtataaagactctttcctgtatctgggcggtatgcacggatataatgtcagcaactggttggtatcgcaggtaggtgttccgggcgtttggatgattctgttggtgactgctatctgcttccttatctacctcagtgcacgtacagttatctggttgcgcagattgttcagccttagcttcctgaagcgcaaacagaaagaggaagaagagaaaggagaaacaccggaagagtttacggactcctggacggcaaaaggaaagaaaaagccggtttctgttcctgatgtggcagatataaaagaagaagaggctcccgttgaaattcccgaacctataaaagaaccggaaaatgaaattacattggatttgggtggcgttacggaaacacagcctgccaaggtatcgggtgaagaagtgtctatgactattgaaacgcctgttcctgatcctgtaccttctttccacgaaaaagcggcggaacccgtattcgaaatagaagctactgaaaatgatgacgaatataaaggcccggaaaaggaaccctataatccccgtctagatctggaaaactatcgttatcctactgtcgacctgatgaagcattatgataatgccgagcctactatcgacatggcggagcagaatgccaataaagataagattataaatacactgcgcagtttcggtattgaaatcagtatgataaaggcgacggtgggacctacggtgacgctgtatgaaattacccccgagcaaggggttcgtatctccaagattcgtggtttggaagatgatatcgctctcagcctttcggcattgggtattcgtattattgcgccgattccgggaaaaggaacaatcggtattgaagtaccaaactccaatccgaagattgtttccggacagagtatcatcggtagcaagaagttccaggagtctacttatgacttgccggtagctttgggcaagacgattaccaatgaggttttcatggttgatttgtgcaagatgccgcatatgctggtggccggtgccaccggtcagggtaaatctgtcggactgaatgccatcatcacttctttgctttataagaaacatccggctgaactgaagtttgtgctggtagaccctaagaaagttgaattcagtatctattcggtgattgaacatcacttccttgccaaactgcccgatggggaagatgctatcattacggatgtaaccaaggtagtgcagacgctgaattctatctgtgtggaaatggatacccgttacgacttgttgaaagccgcgcatgtgcgcaatattaaggaatataatgagaagtttattaatcgtcagctgaatcctgaaaagggacataagtttatgccttacattgtggtggtgattgacgagttcggtgacttgattatgacggcgggcaaagaggtagagctgcctattgcccgtatcgctcagttggcgcgtgcggtgggtatccacatgattatcgctacgcagcgtccgacaacgaatatcattaccggtacaatcaaggcgaacttcccggctcgtgttgccttccgtgtatctgccatgatagactcgcgtactattctcgaccgtcccggagctaatcagctgatcggacgtggtgatatgttgttcctgcaaggggcagatcctgtacgtgtgcagtgtgcctttatcgatacaccggaggtagcggagattactaagtttattgccaagcaacaagggtatcctaccgcattctatttgccggagtatgtaggtgaagatggtggcggaaacgatttgggagatgtggatatgggacgtctggatccattgttcgaagatgctgcccgcctgattgtcatccatcagcaaggttctacatcgttgatccaacgcaagttcgctatcggttataaccgtgccgggcgattgatggaccaattggaaaaagccggtattgtgggacctgcacaaggcagcaaagcgcgcgaggtgctttgtgtcgatgacaatgacctgcaaatgcgcctgaacaatttactataaatcgtgttaaactaatgatgaagaatcttctttttgtttatatctgcctgttcggtctggcattaccgctttcggcacagaaactggatgcccaagatatattggaccgtacagctactgccttccgtcaggcgggaggtattcaagcggattttacggttcagacgtatgcgaaaggtgctttgcaggggagttctgtagggactatccgtctgaaaggagaaaagttcctgttggatgccgacggggtgaaaacctggtttgatggtcgtacgcaatggagctatctcactaacagtgacgaagtgaacgtttccgaacctactcctgaagagttgcaaagtatcaatccttatgccctgctgtccatttacaagcaagggtatcacatgaaattgggcaaaactgatgtttatggaggtaaacctgcttatgaggtgatattaactgcttctgatagaaagaaggatttgcagtgcgttattatttatgtaacgaaagatacctttcagcctttatgtatcagcatgacgcaaaagggtggaaatagcgtggctattcgtataacatcttataaagcgggagaatcatacaacgatcatcttttcacttttgacaagaaggcatatccgactgctgaagtgattgatttgagataaaggtatataccttgccatttacaatctgaagattgtgctacggatggtaaacaaaagtttttttcaatcgtaaattgtaaattgttaaattgtaaatagaattatggaaacagaaaaagtaaaatgtctgattataggttctggtcctgccggttatactgctgctatttatgcaggtcgtgccaacctttctccggtactttatgaaggattacagccgggtggtcagttgacaacaactacagatgtggagaactttcccggttatccggaaggtgtcagtggccagcaattgatggatgatttgcgcaaacaggcagagcgtttcggtgcagacctgcgttttggtattgcaaccgcttctgacctgagtgcggctccatacaaagtaacgattgacgaagagaaggtgattgaaactgatacgttgataattgctacgggcgctacagccaaatatttgggattggatgatgaaaagaaatatgccggtatgggtgtcagtgcttgcgctacttgtgatggtttcttctatcgcaagaaggtggtagcagtggtcggcggtggtgatacggcttgtgaagaggctgtttatctggctggactggctaagaaggtttatctgattgtgcggaagcctttcctgcgtgcttccaaaatcatgcaggagcgtgtgatgaagcatgagaatatagatgtgctatttgagcacaatgccgtgggcttgttcggagagaatggtgtggaaggtgttcatctggtgaagcgtatgggtgaatcggatgaagaacgctacgacctggctattgatggtttcttcctggctatcggtcatcaaccgaactcagatatcttcaagccctatctggatacagacgagactggttatatcattacagaaggcgacagtcctcgtacgaaagtgccgggtgtgtttgccgccggtgacattgctgatccgcattatcgtcaggctattacggcagcaggaagcggctgtaaggcagcacttgaagcggaaagatatctttcatccaagtgcttgatctaaaattgtgagtaaaagagtataaaaagaaaactccggattgtgaatcataatccggagttttctttttattattaatgtgaatccggagttgagtttgcctcatattggtatagaaaggaataagactcaccacagattacacagattgacacagattttattttactgattattagattaataaatctgtgtgaatctgtgtaatctgtggtgaattaattcataaccgaaaagaaaggaacttctttcaacccctgattcgcattattaatatacttctatttcatctacatataagtccgaaggaataatatctcccggtgaatctttccggcagtcaatgccattgcgcaatgtaccaccactttttaaagtcactttgatatagcgcgcttcggttggcgtaaattccagtacatcggtgaacatcttcctgccatgttcaggatattcgcgggtataggatgtctgagctacttccttgaattctttgccattcgtggacacttccacacgagctgcgcttgcgggcagtacacgaaaagcgggattatagagtgtaccgaatatcaccttactgatagtggccggtttttccagatcaacggaaaatacgagttcattgttgttcttttcatttaggctgaaggctacccatggtgtgaaggaagcgatattaccgcgttttccattggtcaatcccaacgtagtggtatctgcgcctaatatatcattctctccgaaaatgtcaccgctcatccaaccccaatgaggagtggtggtgtattgctttccacttatcaggtttgcatacagtttcttgccgttcactttccccagcattttactgtttttgaaagctgctgcctgcaaatcaatgtaaccttcccaagtgaatggctgagtgtaaagttcagactttgcagtcggtgcacttccatctgtggtatatctgatttcggcatccggatagaatgtttccaacacggctttcaatgtgccgtcgtacacgtgcgtattgatattgacatcgaagaaattgcggcatgcttttacgttcatggcatccatacgctcaaaatcttctaccatgcgactccggaagctattccagttcttccggttgttctgtgtccagcccgtctctgccagggcgacggcacgggggaatgcctgatagtcacgacgttcatcactttgcatgtattcgttccatatattaccttgcacaccgatgatatgttttttcaccagttcgtcagcgtcatcgggaacaggattataactataggtctttttcagtgtctgatatccgccgatggtagtcggtgcggtttcgggttcttcctgatactggtccaggtaagcatacgggctgggagtcataattgcgtcgtgtcccgctttggcggcagtgataccaccttccacaccacgccaggacatcactgttgcattgggtgcgagtccgccttccaggatttcatcccaaccgatgatattccgtcctttgctgttgagatatttctccatgcgggtgatgaagtagctttgcagcttttcttcctttgtatgtttcttaccgtcaatggcattcggagtggtatcatctttcagacctaatttcttaatcagttcttggcaatgtgcacacttcatccatgcatctttgggacattcgtcaccaccgatgtgaatgtatggactggggaataattccatcacctcatccagtacaccttccaggaattggaacgtttcttctttggggcagaagacttcttcgaatactccccatgtaccggtaacttcatacgtcgtatccggtctgcaagatagttcagggtaggaggcaagtgcggcaatggcatgtcccggcatctctatttccggaattacggtaatgtatttgcttgctgcataagccactatatctttaatctcttcctgtgtatagtatcctccatgttctttgccgtcaaatatttgcggccagttgacaaaatagtaatctatcaacgtttctttccgcttcgaaccgacttcctgtaatttcgggtatttcttgatttctatcctccatccctggtcatcagtcaggtgaaagtggaaggtgttcatcttatgcatggcaagcatatcgatgaatttataaatgtaatcggtcgtagagaaatgacggcagacatccagcatcaggcctcggtaaggaaaacggggagcgtcttctacttcaacagcaggcagagaccagttggcacgtttcacagttgcctttccgtagatggcgggtggcagcagttggtacatggtctgtactccataaaagaaaccgttgggatgtgatgccgaaagggtgatctcattcggtgcgatggaaagcttgtatccttccttgggcataccttcttccgtaacgaagcgtatgtctggttgttccggattctcctgtgaactggttttcagagaaataccggaggtcaactgaatttgcgcaatcaagctgtccgcaatggcttgtacttcgggagtgcaaccggctgtgacgaaagatactttattgctcagtaagaaacgtccctcttggggagtcatctgattaggcatcggaacgatgttgtactcgttcaccacttctttttgattttgctgacagccggaagaggcacatagcaggcttgctaatagcaaagcacttaatccttttttcatgacataaatgtgtgttaagtttataaatcgggcaaaacagggaaaaggggggtagctgtcgtcaagggggggagatgctactattctttatcctattttacttatctttttcagcttttcttcgtcgatgatctttatttttcgtccgtcgatagtgattaaacgttcagtagagaattgtgatagcgtacgaatggcattggaggttgtcatattcgacaaatttgccagatcttcccgcgaaaggtatatactgagagttgagccatcttcttccaatccatagctttctttgaggaagagcagtgattctgccaatctgccacgaatatgtttctgcgtcaggttgacagtgcgctcatcagcaactcccagatcgaaggatagttgcttgataaagaacatggcaagatcattgttctgtgtcaccaatgtagtgatagcactcatcggtatcaggcagatcagagaaggttcgaaagcggcggcagcagtgacatagtcttctttggcgaaataagcacggtaaccgaaatactcgacgggtttaatcatgcggataatctggcttctgccaccgacaccatccttataaatcttgacttttccatttagaaggcacataaggtatttaggggtttcaccttcgcaatgaatgacttcatttttcttataattctggagcgtaaaatggttagcgagaaattcccgctgttcttcattcaggggctcccacatatcggctatcagctccggaacattcacgtctgacaaattcatttttaccataactgctgcaaaactgtgttatacagcacaaatgtaaaaagaaaaaattaaatattgcacaaaagacacgaaaagatgcagtctaggggcaggaaaatgataatttaccagcgtagcgctggagcaaggttctccttcggcgtgcaagtaatctttcagacacggatgacgtggattcttttttccttcggtgtgatatgccggtatgtatagcgcagctttaaaaatccgcgtcatccgtgtcatccgcgtctaaaagattaaagtccgcgttcgtccgccttatccgcgtagtccgcgtacccattccctcgccgctaaattatcatttcgtgaacagcaattccctatatttcggcaacggccagatctcgtcgtcaacttccatttcgaggtgatcgatgtggtcacgtatcttttccagataaggacggacattttcttcgtaggcgaaagccttgtccttgtagctatccatgtgattggcaactttacgggcttcggtcatttcgcgtaccagaaccttgatggacgttactcgtttggatatttcacgtatcagttccttgcggtcagcactcagtacttcgtattcttcgggagagaagatttccttgaggccacgtaaattctctaacagacggttttggtagctgactgcaatggggacaatgtgattgatggccagatcacccagtacacggctttctatttgcactttcatcgtgtacttttccagttccacttccaggcggcaggcaagctctgtttcattgaagatgcgttcacctatcagtacggaacgagactggttatccatataatgcatcagagcttcgggtacgtggcagatgttcgtcaatccgcgacgggcagcttcctttttccattgatctgaatagccgtcaccttcgaatcggatagcttcggaagcaataatggtttctttcagcacacggaagatggcttcatctttaccgattccttcttccatcaacttgtcgatagaggctttgaattcatttaactggtttgccatagctgcatttatggcaatcatggcagcggcacagttggaagaagaaccggcagcacggaattcaaaacgatttccggtgaaagcaaacggagaagtacggttgcggtctgtcgtgtcgagaaggatttcaggaatacgtccgattcctaatttaagggttgtcttctcttcagccgtcatcttgtcatcgcctacctggcgtacgatatcatccagagtagccgataattgtctgcccaggaatatggacagaatagcgggcggtgcttcattggcacccagacggtggctgttgccagcactcatgatagaggcgcgcagcaaattctgattcttatagaccatcatcagtacattcaccaggaaagtcaggaagagcatgttgcctttaggattcttgccgggtgcaaaaagattgatgccggtatcagtgcagagtgaccagttgttgtgttttcccgaaccgtttacaccgctgtatggcttttcatgcagcaatacggcaaagttatgcttgcgggcgatacgtttcatcaggtccattactaactgattgtgatcgttggcaaggttggcattctcaaagatgggagccagttcaaactggttgggtgcaacctcgttatggcgtgtttttgccggaatacccagtttgtgacattctatttccagttctttcataaaggctgttacccgtggcggaatagaaccgaaatagtggtcttccaactgttggtctttggcggaagaatgtcccattagcgtgcgtccggtcaggcaaaggtcggggcgggcgttgtatagggcagagtctaccaggaagtattcctgttcccagcctaaattagtgaacacgcgggttacatttttatcgaataactggcatacttccgtggcagctttgtctacggcaccgagtgctttcagcaatggagttttgtagtccagcgcttcgccggtatatgagatgaagattgtagggatacacagagttgtatctaccacgaaggcgggagaggaaacatcccatgctgtatatccgcgtgcttcaaatgtattacggatacctccgttggggaaagaagaagcgtccggttcctgttggatgagcaatttgccggagaagcgttcaattacatttgaattttctccgaattcgatgaatccatcatgtttctcagctgtaccatccgtcagcggttgaaaccagtgagtgtaatgagtaacgttcagggatttggcccaacttttcatgccgtttgctatcaggtcagctatctctctactgatgggagtccctttttcgatagcatctgttacagctttgtaagcttctctgggtagatattcctgcattttcttacggtcgaacacgtggcttccgtagtaatcggataatttgttcgaaggggttgtaacttcaagagggcgccggttggcaagctcttgcaaggcgtaaaatctcatttttgacatatttgtccttcttttgttggttgttgggcgcaaaattatatgttttttccggaagtacccctattttttagggggtattattgaaaataatgtgttttttatgcggataccccctaaaatattcggggatgttacagagaaaactcttttaggggattttatctccgctcttttctatattgaagttatatctgggctgtaatgaagaatctttcatcaggtttcttaaaaagagaggtatttcgtcgttttacaacctttttttctatatttgtccctatatatttggaggtattgccgttgaaacgcgtcttttgtataggaaccttgctatgtcttttgctttcagcttgtccgaaagtgcaggcagcttctatccctgatccttacgatgcgagcttgctttctgcggactctataatgaagaaagtcatcttctttgctcctttttatgaaagtattatcgacgactatagagccgatctttatattaagggaaaagtgaatcttcgcaagaaaaatcacatcttacgctttattcctaccatgttccgcatccggaaaggagtgagggagtatatgatggaaacttatagtgacttgcattttactgctcccgacatttatgatcagaaagtaaaagccagtgtcggtaccacttccgagttttgggagctggacggaaggttgccggaatatttccatgttaatatctacgcttctaccttattatatgataagcttctttcgcctttggctccaaatgcgatgaaatattattcttatcatgtcgattcggtaatgggtaaagtgcatgatttgcaatataagattagtttcaaaccgaaaagcaaaagctttcagttggtcagcggtcacatggtggtcagtgagaatgtctggagtgtgcgtgagatgcattttagcggacgttctgaaatgttgcgtttcaacaatatgatacgtatgggagatgtgggtgaatcggatgagtttttgcctgtacattatgatgtggatgccactttccgctttctgggcaatgtggtcgatgccaattatattgctgctctcgattataaaaccattattcagaaagacccttcacggatggaccggaaaagattgaagagcaagtatgatctgtcggagtcctacacattgcgcagtgatacgaatgccaacaagaaggatagttcttattttgagagtatacgtcccattccgttgactgtacatgaacaggacttatataaagatttctttttaagccgtgatacttcatatcgatataagaaacccaaaaataagaatctggaattttggggacagatcggtgatgcgcttatcagccgctatacggtagatctttcgaaactgggcagtgtgcgctgttcaccgcttatcaatccattcttgctgagttatagcgggaagaatggtttttcttaccggcaggaatttaagtacaaccgtatttttacgggcgaccgtttgttacgtatcgttcccagattgggttataacttcaagtataatgagttttattggtcgataaagtcagattttgattactggccacgtaagcgcgcggcccttcacgttaatctgggtaatggccaccgcatttatagtagtaggatgctggatgaattgaaaaacattccggatagtgttttcgattttgatcaggtacaactggattactttaatgacttatatttgcaggtgcgccatagttgggaaatagtgaacggcctgtcgctggatgtcggtttctccatgcataagcgtacggaggccaatcgttcgatgtatgtatccacaagggcgacttcgcgaagtgtaggctcttcttcagaagtttatcctgattggacagagaaaatgcgtcattcttacaatagttttgctccgcgtgtccgtctgacgtggacgcccggtcagtattactatatgaatggggatcgtaaagtgaatttacattccaaatatcccagtttttcagtggactgggagcggggtatcaatggggtttttaaaagtaccggtacgtatgagcgtgtagaggtggatattcagcactccattcccttggggttgatgcgtgatttttatctccgctttggatggggtgcttttactaatcaaaaagatatatactttgtggattttgccaattttacccgttccaatcttcccgtgggatggaatgatgaaattggcggtgtattccagttgcttgacgggcggtggtataactcctcccgtaaatatctccgtgggcatttgacgtatgaatctcccttcctgatgttgcgtcatttggtgaagtatacacagcatgtgctcaatgagcgtctttatctgaatgctttggttgttccgcatctgaacccttatgttgaggttggttatggcatcggcaccaatatttttgatttcggagtctttggcagctttgccaattggaaatttaaggagataggttgcaaattcacttttgagttattcaaccgataatctttaagtttttcctgtatttctgttattaacttcctttataaattacccggctttcgtgttattgtagtttagaaaaacagtgttctatgttctataacatgcaatgacgtattcgatgaaagtatagtgttttctctgattatcaattgtttatttgtttttgacgtattgataacgtattctgaattttgaattgacgtatttaagaatgggtacttagggcttcttttattgcattttactctatgtttgcagtgttcaattgagaacgaaaccgagaattgttaatcttaatttagtaaaacttatgaaaaagttattatcagttttatttttactgagctttaccttagcttctgctgtatatgcacaagatatacagataaaaggtacggtggtaagtggtgcggacaatgaacccttacctggagtaaatgtggtggtgaaaggtaatgccactacgggaacaatcaccggtatagacggtgaatttgctttgtcggttccctccgacgcaatcctttctatttcttatataggattcaaatcacaggaagtttcggttagtggcaagcgtgaactgaaaattgttctgcaagaggattctgaagcgctggatgaagtggtggtagtgggttacggtgtgcaaaagaagagtgtagtcactgcttctattgccaaggtaagcagtgaagacattgccggaaaggctcctgttcgcatggataatgcattgaagggactggctgccggtgtagatgtaacttcggcttcaggacaaccgggtgattctcctcgcgtacgtgtacgtggtatcggtactattaataatagtgatccgctttatatcgtggacggtatgcctatcggaggtggccttgactttgtgaatccgaatgatatcgaatctatcgaagttttgaaagatgctgcatccggagctatttatggtgcacgtgctgccaatggtgttatcctcgttaccaccaaaaagggtaagatggggaaggcacaaattaattataatttttcttatggctggcagagtgcatggaagcaacgtgacgtaacaagtgctacggattatgctattttgcagaatgaaagtcgcgtgaacggtggccaggctccggtgtatgctgatccctacaatttgatagatgctaatggacaagccatcacaggttttggtacagattggcagaatctggtgttcaatgacaatgcaccagtggtgaatcatgatgtaactatcagtggagcatctgaaaaaataaattattatctctcattgggatattatacgcaagatggtattgttggtggtaactacgggcaatctaattatgaccgtctgactattcgctctaacacacagtacaatctgattgatgcttccaaggaacgtagcttccttaataagttggatttgggtgtaaatatcgcttatatgcgcacacactccaccggcatctccactaactcagaattcggttctgctttgggatcagctctctatttgtctcctatattgacacctacattgacaggggatgcagcaactgaaatgatagactattataaggcttatgacctgcctcgtgatgcaaatggaaatccctatacagtgcccggttatggtggcgcttatcaggaaatgaacaatccgatggccatgatgacgttaaatcctcagaagaattggtcacataagtttgtacccaagttttcttttgacttgcagttgtgggataatctgaaatatcactttagttacagtgctgatatgggtttttggggatatgacaaggccacaacttcccgtttctatctttcaggcaataataatgcttcacataccagtgtggaagccaataaggagcagaatgttacatggcagttagaaaatactttgacttatgataagactattggtaagcatacctttggtgtggtattgggacagtctgctttaaaatacaagggtgattatttgaagggtaatcgttggaatctggttaatcctgataaaccttccattgactatgctacgggaaatatcgaatatacttataagacagatggagatggtaattatatattggataaagatggaaataaaatcatatccactactactgttcagtatggtacatcaggtgctccccgtgtggaacacactatgtcatccctctttgcccgtttcagttataactatgacgaacgttatatgattcaggctacgatacgtcgtgatggttcaagccgttttggtcctaacaataagtatggtacatttccttctgtatctgcaggctggaatgtgatgaatgaggcatttatggaaaatacacgtgaatggctttctaacttaaaaattcgtgctagttggggtaagaatggtaatgacaatatagatgagttcgggtatacctcacttacggctatcggtaataatgtgcttcttggtagagatgccgtcaagtatatcggatcaaaggcgcagcgcctggccaatcctgatttgaagtgggaagaaagtgaacagactgactttggtatcgacttaggtttctttaacaacgcattgacagtcagcgccgattattatatcaagaagaccaatggcatgattatggagatgcctattccgagttatgtaggtgaaagcaaacctttgggaaacgtgggtgacatggaaaatagcggctttgagtttgagattagctacaagtggaatatttcggatgctaaatttgctgtcaagggtaatgccacttatcttaaaaatacattgaagaacttaggtaatgacactggctatatggattttgatggtattcaaggattgtccggtggtggtacgcgtgggtcaaacggacagccttttccgtacttcttcggctataagactgacgggatattccaaaatatggacgaggtccgtgcttatgtcaataaggatggggctatgataatgccgaatgccgttcccggtgatacgcgctttgtggatgtgaacggtgacggaagtatttcggctgatgaccgtaccaatatcggtaatggtacgcctgactggacttatggtttaaacttcaatgccgactggaaaggtttcgacttcaatattttcttccagggtgtagccggtgctgatatttttgatgctacttatcgtaccgatgttgcttcaggtaactatccttcctggatgctaggtcgctggaccggtgagggaacttctaataagtatccccgtttggcagtgggtgatgccacaaactggatggtgtccgacctttatgtatgtgatggttcttaccttcgtctcaagaatatcactttggggtatacattacctaaggctcttactcgtaaacttactatcgaacgtttacgcttttatgtgcaggctgagaatctggtgacttggacaaagtattggggctttgatcctgaaatctcttccggtcctgatggcattaaatctcttggtatcgatcgtggtgtttatccacaggctcgtacctttactgtaggtgtaaacgtttctttctaatctaaaaaatcaagaaatatatgaaaacaaataagatattagcaataggcttactttctgtcgccacgatgctaactgccggttgtagtgacagtttccttgaggtggaaaaccccacaggtgaacctttggaagattattatactacggatgcgcatattcaggaggcactgattgcggcttatgatcctattcattgggccgactggggattgggacagtataatgccctgaatattgatgctgaaatcatgggtgacaatttctgggtaggcggtgccactaagacggatatgcagaattggcatatgcttttcaattatgaaggtaatgagaacaatacactcagttctctttggacagtagactattcgggcgttaagcgttgtaatgatttgctgaagtatttggattgggctactgatgttacaccagaaaatcgcaatagctatgagatgcaggcgcgttgtttacgtgtgttctattataatatgctgtggcattatttcggcaatgttcctttctatctggagaatctttccaagcctccctatacagctccacaatacaaggccgacgatgtttacaatgaactgattgtggaattggaagctgtgatagattcgaaagtgttacctttgaagtactataagactgctaaaggggaaaatgatgacagtcagttgggacgcgtcactcagtctatggcttatatgatgtatgctgaaatggtgatgtatcagaacgatgaggctcgttttgcaaaagctcttggctatatgaaagagattatagcagactccaactttcagttggtgaccgattatgcttccatctgggacacaaccggtgagtggtgtaatgagtctatttgggaaatcaattacgagcagactaactctgaacgtggatggggaagtccgttggctattggtggtactgtgcttcctacactgatttcacccaatacatttactgctgatccagattggacaggtgaaggctggggatttttgccaatgcgcctcgaaacctatgaaatgtttagcagtacggacaaacgtcgtgatgctacttgctgggatgtgcgtggaacggagtataccgcccgctatcaggatacccatatttggttacgcaagtaccgtccgtatgaccggaattttaagagtgctccattcgaccagaacttgaattacaataataattaccgttattatcgctatgccgaaacgttgcttaatgcagctgaactgtctctccgcaccggcggcagcgcaaccggtgaagccaagacgtggctgaatgcagtccgcacccgtgccggactgtcagaactctccacagctaccgtggacgatatactcaccgagcgtcgtcttgagtttgtgggcgaaggtaaacgttatttcgacttggtgcgtgctgagggtatcaacggagcttcatccaagaataaggctactacggcacttattcccgatgaatatggttatcgcactaattcctggaattcgaagaagaaatatattcctatcgcgcagggtgagttggattccgatccggccttggtccagaacgattataaatagtttcccataactttattaaagaataaacgatatgaaaaatatttttaaatatatggcaggggtgttgattgcaagttttgcaatgactgcatgttcgcccgaagattttacgggtgcaaatggagatatcccgcaagcttcagattatgctgacaattttaaagtgactgtagatcagtcaaccaattatgcgaattttgaatttacttccgctcctggaattactccggtttggattattgatggtgcaacttattcgtcggcatttagcctttcaaagtattatcgtaaaaaaggtacatatactgtagaatgcaaagtgaagaatgctaatgggttcagtgatggttctgttgtgaaaacttttgttgtagagaaaacaaagatgaccggtttcggtggtttcgtagaagatagtaactacaatcttttcaagggattggagcttccgaacaatcccggtaataatgataatccagcacataatcctgcattttggtatgctccgggatggaatatgatagatgctcctcgatgcgttttatctaagggagcttataccattactcttcctgaggctactactgatcagtggcaggcacagatggcaatcaatacagggctgtctatttctgctagcaagcattatgatttttctgttattctcacatcttctacagcgcataaaaacgtgaaggtgaaaatctgtcaagctgataatgataatattattcttatggataagaacttcgctcttgatgcgggagagcccaaagcattgtggggggcggatcttgaaatctatagcgcagaccctgaaaacataccagtaactgactttagtaatgttaaggttgtattcgattttggtggaaatgcggcgaacacagaagttagcattgaaagttttgtactgaaagatcatgctaatgatgatggaactgaaatacccaaagaactagttactccgtttgattataatgatgcggctaatatttggaaagctgtggatgagaattctacttttactcaggaactttttttggtgatgatggttggggggcgattgactgtaatccggaaaccacacacgagggtagtaagcatacaatagtagttcctgtattgacatctgcagctgagatatggcgtgctcaatggaaatttcatacagacctttcggctacagttgatgatactgtggacttctcggtgaagattaattctactgtcaagttacccggtatgatagtcaaattgacaaaagatggtgatgatgaaaatttcttcttcgctaaccaagaagtaatccccgcaggagattttgtattcaaaatagaaaatgcaaagttatctaaagatgaagatgctccgaaactgatgctcgtctttggttttggcggggctcctgaaggtgctgtaattactataagtgaaatcacggtcattaaaaaatagggctgaatggcctgtttgataaattgtttactgaaacttgggaatagaatatattccttataaatggaaggggaaggacgtgatcttatgaatattgagatttcattctacccccttctttacagaaaacagttcataggtcattccattcgacaactgaatattatcgaactaaatatgttgataatgaaatataactatgttttatctttgttgtttatagtgttaatcgcttgcggaaatagcgatgatgaattggatccattatctgataatgtaacattgacatgctctcctgaaaagctagaagctgttgctatagaagctatttatacgctaaatattacttgtagcggcgttgaatggacagcttttgccagtgatgattgtacctcttgggtgaaagtaaaagtgctggattcttctttggataaagggaaagtcgccgttactgtgaatgtaaattcgggaacaactgatcgcaacggttctgtaatcattaaatccggagcaaagcgtgttgtggtacctgtgacgcaaggaaccccaatgtctgtttcgaagcgtgagatatattccaattctcgtggcgagaacttcctattgtccgttgtagctacgggtgactggagtgtgacgtctaacgatagttggctaaaggccgaaaagaaagatggcaagacagtaagtgttacgacagaccctaatgagaataaaacttcccggaagggaactttggatattgtttcgggtgcggagaagattacggtgagcatcactcaagagtcgactgaagaccgtgagataaacactcccgaaggatatcgcctggtttggcacgacgagtttaatgaaggtagcactcttggcaccgattggacacacgaagtgcaaaagcctggttgggtgaataatgaacttcaggaatatgtgaatggttcagcaaatggtaagcatgtgacggaattagtagatggtaaattaaatatcaactgctttaaagggtctgatggtaagatatattcgggacgtgtgtatgctaaagtaaatactggatggctttatggctattttgaggctcgcatcatgcttcctaaaggtaagggtacttggcctgctttttggatgatgccagtgaacaataattactctactaatccctggccggggtgtggcgagattgacatcatggaagaagtgggtgttgatgcgaatatcgtgtcttcttctattcattgtgcagcttataatcataccataaacactcagaagactgcatctcgcaatattggtacggcagagtcagagttccatgtctatgcttgtgagtggacacctgactatctgaaattctttgtagatggaacagaattgatgacattcaagaatgaaggttccggcaaaaatgtgtggccgttcacttatgctttctatcctattctcaaccttgcatggggcggtgattggggaggatacaaaggtgtagatgagagcgccttgcctataacgatgaaggtggattatgtacgggtattccaaaaaaaaacagtgtaactaataaaataattgtaatgaaaactagatatttcctttctgtttttcttctttgcttctttttttcttgtgccgaagaagataacatggtaattagtaatgaaatgttgacggagtcatcgttacaaatggaacaagccaagatcgctatttatgctatgggacttgacacaacatttatttctgaatgggacaggtattatgttgttgaagaagatatattggtatgtaaagatagcgtgaatttatctagaactcttaccagacagtataaaacgacttaccatgtggctaattttcagacaatcactattggtgttgataatactatcgcttcaaatactaattggagagaggctgtgcaagaagtcattgtattgtacaataaatatacgggattaaaatttgtatatacggaggatgatccagatataaaaatttctaaaaaatatatttcaggaacaaatgtatgtgcaagtggtgtgtttccttcatcttcaagaaagccaggggaagcgataatcattaatagtaatttttttaaagatatagattcttttttatctttaaatcaaaaaatatttttattggcgcatgagcttggacataacttgggattgcggcatactaatggtggatctgagggtgcggctggagtaggtttaattcaaataccaggaacgcctactactgattctgactcttttatgaatgctggcacatgtggtaattcttggactaagttttcacattatgatatagttacttttaactatctgtggcctaaagctcgatatacagtttcttttgcaaataattgttgtccttcaataacagttgaagtaggcagtctattagaacgctctattgctcctgaatctgattatcaaatcttttccgggtggtatgaagatagagagttaaccattccgtggaattatggaaaacgaatcacgggtaatctttatttgtatccaaaatggagatatagaacatcaccattagttacttatcgaaaggagtcatatagtactaatcaggtatcttttactttggaacaaactacaggggttactctaacaggtcaagtctgtcgtgggtttaatgagtggtgggaaattgctaaatatggtggtgccactaatgtagctgtcggcaaatcatcaacattgattaaagttatgtatgtgaatcaatatattcaaacttctagtacagttggagcttttgagcatacagagaggcttgtattggaggctggaacttattggttatctgctacattcccattggaactaggaccacaaaatggagcctcattaaaacatggggtgacagttgctaagatagcttattgattaatgataatctgtaatcataattatataatttagttaattcatgaagacactgaaaatcttctccgcctgcttgtttctcttgccttttgtctcttgtacgcaagtagccaataaaggtagtgatgcggcaaccgagaaaaaagtagaatctctcctgtctaagatgacccttgaggagaaaatcggtcagatgaaccagatttcctcttacggtaatatcgaggatatgagtgctttgattaagaaaggtgaaatcggttccatcttgaatgaggtggatccggtgcgtattaatgcgctacagcgcgtagcaatggaagaatcccgtttgggtattcctttattgatagcgcgtgatgtcattcacgggtttaaaacaattttccctattcccttgggacaagcggcttcgttcaatccgcaggtagcgaaagacggtgcacgggtagcagctattgaagcttcgtctgtaggtatccggtggacttttgcaccaatgattgatattgcccgcgatcctcgctggggacgtattgccgaagggtgtggtgaagataagtaccttacttccgtaatgggagcagctatggtagaaggttttcagggagattcgctgaatagccctacttcaattgcagcttgccctaaacattttgtaggttacggtgcagccgaaggaggacgtgattataattccacgtttattcccgaacgtcgtttgcgcaatgtttatttgccaccttttgaagctgccaccaaagcgggtgcagccacgtttatgacttcatttaatgataatgatggaatcccttctaccgggaatgcttttattttgaagaatgtactccgtgacgagtggggattcgatggttttgttgtgacggactgggcttctgccagcgaaatgataagccatggctttgccgccggttcaaaagaagcggcaatgaaatctgtgaatgcaggagtagatatggaaatggtgagttacacttttgtgaaggaactgccggaattagtgaaagagggaaaggtgaaggaaagcactatcgatgaggctgttcgtaatattttgcgtatcaagtatcgtttaggattgtttgatactccttatgtagatgaacaacaaacatctgtcatgtatgctccttctcatttggaagcagctaagcaagccgctgttgaatcggctattctgttgaagaatgataaggaagtgttgccgttacagccatctgtgaaaactgttgcagtggtaggacctatggctaatgcaccttatgaacagttgggtacttggatatttgatggtgagaaagctcgtactcagactccgttgaacgctattaaggaaatggttagcgataaagtacaggtgatttatgaaccgggactggcatacagtcgtgagaaaaatccggcgagtgtggctaaagcagctgccgccgctgcgcgtgcagatgtcattcttgcttttgtgggtgaagaatctattctttcgggtgaagctcactgtttggctgatctggatttgcagggtgatcagggagctttgattacagctttggctaagacgggtaaacctgtagtgactattgtgatggcgggtcgtccgttgactatcggtaaagaagtcgaagagtcgactgctgttctctattcattccatccgggcacaatgggcggtcctgcattggctgatttgctttgggggaaggctgtgccgagtggaaaggcgccggtcactttcccgaggatggtgggacaaattcctgtgtactacgctcataataataccggacgtccggctacacggaatgaagtgttgctgaatgatattgctgttgaggcaggacagacttcactgggctgtacttccttctatatggatgcgggttttgatcccttgtttccgtttggttatggcttgtcgtacaccacatttaagtatagcaacatcaaactggcgtctgatgtactgaaaaaagatgatgtgctgacagtgacattcgatctggaaaataccgggaaatatgaaggaacggaagtagctcaattgtatatacaagataagattggttccgtgacccgtccggtgaaagaactgaaacgcttcactcgtgtgacattgaagccgggtgagaaaaaaagcgtttcgtttgaactccctgttagtgaacttgcattttggaacatagatatggctaaagttgtggaacccggagactttgggctttgggtggcaacggatagtcagtccggagaagaagttttcttcaaggtagtagactgattggtgattttaaggttaaagtagaagaggggcggttcgtgatggttcgcccctcttgattattttattttttgacacttaaatagaattcatggttattttatacgtttataaccgtaaacagcattagcgcccagttcttcttcgatgcgaagcaactgattatattttgccatacggtcggaacgactcaatgaaccggttttgatttgtccgctattggtggcaacggcgatgtcggcaatcgtagcgtcttccgtttctccggagcgatgggaggtcacggtagtgtatccgtggcggtgagccatttcgatggcattcaatgtttcggtcagggaaccgatttggtttactttaattagaatagagttggcacaacctttttcaatacccatggccaggaaatcaacgttagtaacaaagaggtcgtcacctaccaactggcaacggtcgccgatgcggtcggtaagtttcttccagccttcccagtcattttcgctcatgccgtcttcgatagagtcgatggggaattggttgataagttgttccagatagtcaatctgttcgtcagctgtgcatttcttgcctttctcgccttcgaacttggtataatcgtagattccgtctttatagaattcagaagaagcgcagtccatggcaatcattacatctttgcccggttcgtatccggcagctttgatggcggcaataatactgttcagggcatcttctgtaccttccagatttggtgcaaaaccaccttcgtcacctactgcagtgctcagaccacgatctttcagtactttctttaaagcgtggaatacttcggcacccatgcgcagaccttcacggaaggaagttgcgcctacagggcgtatcatgaattcctggaaggcaataggagcgtcactgtgcgaaccaccgttgatgatattcatcatcggtacgggcattacgtatgtattggtaccaccgatgtagcggtacaggggtatatcgagataagcggcggcagctttagctacggcgagggatacgccgagaatagcatttgcgcccagatttgatttcgttttcgttccatccaatgccagcatggtatgatcgatgcccatctggtcgagggctgacattccgacaagtttcggagcgataatatcattgatgttttctacagcttttaatacgcctttgcctccataacgtcctttgtcgccatcacggagttccaatgcttcgtgttctcccgtagaagcgccggaaggaacggaagcacggcccataaagcctgattccaacattacatctacttccactgtgggatttcctcttgaatcgaggatttcacgtccgataatcttttctattttcataattatgatattatttgtaattattttaaataggaaacaagaagcaatcggtttttgttcagaatatagttgtgtttagtgattagtggtgagtgataagtgattagtgccgactgctcctcccaccaatgcagccaatattcccaacgtgatgctgattaaggtatatgctataaatgttccatagaaaccacctttcagcaaggtcagaccatcattggaaaaagtagagaaagtggtgaatccaccgcagaaaccggctgtcaataacagacgcatttcgggcgagagattaaaacgagcggaaagggcataaaacaacccgatgagaaaactgccgaagatattgactgtaaatgttgcccaaggaaaggaataagggatgatccgttcgtgcagtagttcctgtacatagtaacggagcacactacctgttccgccaccaaggaaaatgtatatcaattctttcatttttattctgttattattccgataatgcctgcaaaggtacaatttttcatttatatcgggtttatattccggtttttccccttaatgcttaaaaatcagaaactaaaccagttatgcaaacgtttgccggtaaatcatctatattttcattttattccttcgttcacatgtcatttcatccttatatttgcatcacgattataattctctaaaataattcaaatcatgaaaaacatgaaagcaatcaaattgttctgtctcttgctctttttgtttgtaagcaattgggcaatggctgagagtatcacctcgccgaacggacaactgcaactgaacttttcagtgaacgcacaaggtgaaccgatctatgaactttcctacaaaggaaaagctgttatcaaaccttctaaactcggcttggaactgaaagatgctccgggactgatgaatggatttacactggcaaatacccaaacttccacttttgatgagacttgggagccggtgtggggtgaagtgaaacaaattcgcaaccattataatgagatggctgtaacgttgaaccagaaagcgcaagatcgcaatatgatcatccgcttccgtctgtttgatgacggtttgggtttccgttacgaatttcctttgtctaagaacctgaattatttcgttatcaaggaagaacgtactcagtttgccatgacaggcgatcacactgctttctggataccgggcgattatgatacacaggaatatgattatacagaatctaagctttctgaaatccgtggcttgatggatggtgcaatcactcctaattcttcacagactacgttctctccgacgggtgtacagacttctctgcaaatgaaaacagctgacggtctttatattaacttgcatgaggctgctttggtggattactcctgtatgcatcttaatctggatgataagaattttgtattcgaatcctggcttacccctgatgcaaaaggagataaaggatacctgcaagctccctgtaagtctccgtggcgtacggttatcgtaagtgatgacgcccgtgatattctgaattccaaactgacgttgaatctgaatgagccttgtgcttatgaagatgtttcctggattaagccggtgaaatatgtaggcgtatggtgggaaatgattgccggaaagagcacttgggcttataccgatgatctgccttctgtaaaattgggtgaaacggactataccaaaactaaacctaacggacgtcatggtgctaccaatgaaaacgtaaaacgttatatagactttgcagctgaaaatggacttgatcaagtgctggtagaaggttggaacgaaggatgggaagactggttcggtcattctaaagattatgtatttgattttgtaactccatatcctgactttgatgtaaagatgttgaacgcttacgctaaaagtaagggtgtgaaattgatgatgcaccatgaaacttcggcatccgtacgcaattatgaacgtcatatggataaagcctaccagtttatggtagacaatggttacaatgcagtgaagagtggttatgtaggcaatatgattcctcgtggagagcatcactacggtcagtggatgaacaaccattatctgtacgccgtgactaaagctgctgagtataaaatttgcgtaaatgcccatgaagctgtgcgtcctaccggactttgccgtacttatcctaacctgattggtaacgagtctgcccgtggtacggaatatgaggcttttggtggcagtaaaccgttccacactaccttgcttccatttaatcgtctgattggtggcccgatggattatactcctggtatcttcgatacaaaacttgatttcatgggcgatctgcctcatggacaggtacagaccactctctgtaagcagttggctctttacgtgacattatacagtccgttgcagatggctgctgatttagttgagaattatgagaagcacatggatgcttttcaattcatcaaagatgtagcggtagattgggatgatagtaaatatctggaagcggaaccgggtgattatattacggcagctcgtaaggcgaaaggaacgaataattggtttgtaggtggcatcacagatgagaatgtacgtactgctaactttactctggattttctggaacctggcaagcagtatgtagctactctttatgctgatggtaaagatgctgattacaaagagaatccgacttcttatcagataaagaaaggtattgtgaccagtaagactaagatgtctgtgaagttggcacgtagtggtggctttgccctgagtttgattgaggctactccgtcagacaagaaggttgtgaagaaatggagatagataagattcatcggaaactctcagattgagagctactctaaaattagggtaaaaagaggtttttattaggcattaggtaaataaggggtgcacttcaaaatttgaagtgcgcccctttcttttttctttgtatgacttcttgctgagtttcttaactcaagggcccaggtttgttgctgcaaaatagaatcgatgcttccacaacttaataagacgattgagcaagaacttgatggtatggcttgattacccctgaaatgggaggctttgcattgactcgatggttgcagataatgcactgaattatatcatttgtcactaaattggaataaactttagaagtcttgtgatgtaacaaagtttgtcctgttttcaaggtattaagagcttgtttccaagaagttaagagtttgtcgacaaagagttaacttcctgtcgacaaactcttaacttcttggaagtgactaattctcagagtggttttaaagtgcctttgtcgttgaggtaatgagcgaaatagtgttgaataaaatccttattgtctggtgtgttaatcatagcttgtatagggctacaccttttgccgcaaagggtgtagccttacatacaaaagggtgtagtcatccggggtaaatggtgtagcccttttggaagtgcccttacaggtacttgtggataggattaaatgatatgattagaattatttttattaaacactttgttctttcgaaaatcccccttatctttgtgcccattaaacgaacgattaatagtatattttgttctattaagtcttttgtttacagtatattagaagtcgagaactgtgctttttcagcaaaatcagcttttccagtcttcaaaagtgcctgtttgtacttcctgcgatagggagtctgaatttaggccgttgaacgtagcaaattcaccatcacggatttacgttttaaccggaaggaattttcattccccggtgtccccaagaaatatccagacgagaacagttaatcattcatgagctctcaatcttccattttgaattctgaatatcattggtatgctttgcgtatcacctatagccgggaactcgttctgaaagagtttttggacaagaataatatcgaaaacttcattcctatgcgttatgaatatgtaacgcggaaggagcaacgtattcgtaaactcgttcctgccatacataatctggttttcatttattccactcgtaagaagattgacgaaattaaggaggaaaatgctgttcttctacctcttcgctatatcatggatcgtgagacgaagcagccgattattgttccggaaatccaaatgcgccactttatagccattgctggctcttacgaccaacaagtaatttacttgccgcctacggaatattccatgcagaaaggagatcgtgtccgcatcaccggtggagttttcgaaggtgtcgaaggtatatttgttcgtgtaaaaggtgatcgtcgggtagttgtttctattcagggggttatggcagtagctaccacttttattcatccctctcttattgttccgataacagaagaataattcataattctgcacattgtactttgttacttatacgctttgtaattcataatttgtaatcttaattatatgaagtctcaaatcgatgctttgcgtcaactcacgcatgagcttctttatcttggcatggatggtgaacccatttatgcggatcgttttcgtcaactaaattcagatgtttataatcaggcggaagccttgtatcagaaaaaagctcggaatgatgaagaagaagcgactctttgtgttactctcttgaaagcttatagtgctacgatttatgatcgtggcgataaaggagaaaaagttcaaatactgcttgatcgtagttgggaggttctgaataaaatatctgattctttgttgaaatgtcaattgttggtggtttgctatggagagacatccgatggggagttggcgaaagaagcacgtgcgattatgaatggctggggtgattctctaactgttgaacaacaagaacttttaaatgaatttattccctaatatttgtccatagttttatatgaaaattcttgttacgggggctgctggtttcattggttcgtatgtttgtaaacgtctgctttctcgtggagatgaggtggtagggcttgataatatcaacagctattatgacgtcaatctgaagtatggacgtttgggtactttaggcattgataaaaatacggttgattggtataaatttgtccaaagtaatacatctgagcagtttcggtttgttcgtataaatctggaggataaacaggcgatgcgaatgctttttgccaatgagtcttttgacaaagttgtaaatttagcggctcaggctggagtacgttattcaatagaaaatccatatgcatacgtggaaagcaatatagatggtttcttgaatgtattggaaggttgccgtcattacaaagtgaagcatttggtttacgctagctccagtagtgtttatggattgaacggaaaagttcccttttctgaaaaagattgtatcgcacatcctgtaagcctttatgcagcgacaaagaaatcaaatgaattgatggctcatacttatagccatttatatggcattccttctaccggtttgcgcttctttacagtttacggcccttggggacgtccggatatgtcacctttcctttttgcagatgccatgttacacgggaggccaataaaggttttcaataatggtgatatgttgcgtgattttacttatattgatgatattattgaaggaatccttcgggtgatagaccatattcctacttctaatcaggattggagtgctcaaaaccctgatccgagctcttccactgctccatataaaatatataatataggtaattctcatccagtgaaacttatggactttattcaggcaattgaaggagctattggacatcctgcagagaaaatatatcttccgatgcaaccgggagatgtttatcaaacaaatgcagatacttcggctttgcagaatgagttgggatttaagcctgacaaatctattaaagagggagttcaggaaacgatagactggtatcgttctttttatcaattgtaatcaaaagtaaactaagataatatgaaaatagcaatagttggtaccggctatgtcggtttggtgacaggtacctgtttttcggagatggggattgacgtgacttgtgtggatgtgcaggacagtaagatagaaaatctgaagaacggtattattcccatttatgagccgggcttggaagatatggttcatcgtaactatactgcgggtcgtctgaaatttacgacagacttgaaggaatgtttggatgaagtggaagttgtgtttagtgctgtcggtacccctcctgatgaggatggcagtgctgatttgaaatatgtgttggaggttgcgcgtaccattgggcgtaatatgaataagtatgtgctggttgtgactaagagtacggttcctgtggggactgcacaaaaggtaaagtctgccattcaggaagaacttgacaagcgtaatgtaaagatagagtttgatgtggcttccaatcccgagtttctgaaagaaggtgatgcggtagatgattttatgaagcccgaccgtgtggtagtaggtgtggagtcagaaaaggctaaggctataatggagcgtctttataagccttttatgatgaataactatcgattgatatttactgatattccaagtgccgagatgataaaatatgcggcaaattctatgttggctacacgaattagctttatgaatgatatcgctaacctctgtgaactggttggtgctgatgtaaatatggttcgcaaaggtattggtgcggatagtcgtattggcagtaaatttctgtatcccggttgtggatatggtggttcttgttttccgaaagatgtaaaggcattgataaagactgcggaaaagaatggttatccgatgcgtgtgttgaaagccgtagaagaggtgaatgaggcacaaaagagcattctttttgagaaattattgaaacattataatggagacttgaaaggtaagcaaatcgctttatggggtttggctttcaagcctgaaacggatgatatgagggaggctccggcattggttttgattgataagttgatagaggctggtgcaagcgtgaaggtctatgatccgattgcaatggatgaatgtaaacgtaggataggagataaggttgtctatgctacggatatgtatgatgcggtgttggatgcggatgcgttgttgctggtgacggagtggaaagagtttaggatgccgagttggggagtactgaagaagacgatgaagaaggcagtggtgattgatggaagaaatatatatgagaagtctgaattacaagagttagagattgtttatgcttgtgtcggtagataaataatgatgtgtgtaatatctgtaagtcttccattttgggtttctgaatgatacgtatattttgctgcgaaaagaatttgaattgtaatatatattagtatgaagattataaacacatcaattacaggtgttattatcattgaacctcgcctttttagcgatgaacgtggctatttttttgagtctttcaatcaaaaagaattcgaaaaaaatgtttgtaaaacggtttttgtacaagataatgagtctaaatcatcttacggggttattcgagggttacattatcagaagccaccttttgctcaaagtaaactagtgcgtgttataaaaggtgcggttttagatgtcgctgtagatataagaaagggttctccaacttttggacatcatgttgcagtagagttaactgaggataatcatcgacaattttttattccgagaggttttgcacatggattttcagttttgagtgaagaggttgtgtttcaatataaatgtgataatttctatgctccgcaatatgagggagctattgcttgggatgatcctgatttgaggattgattggagaatctctgataataatttgatattgagtgagaaagataaagtacatccaaatataaatgatataaattgtttatttgattatatggaggtattgtattgagataagtatattttttacaggtatctccttgtttatactttatattgatttaattaatttatatatacttgtgcctcttttattttagatgttgtatttgttgaaaatatttatagaaagtgggctgtcaagcaatgagatgcttggtagcgatgtttaggacattaataattaatcattatgcaagcaattatcttagctgccggtatgggaaaacgtttgggtgaattgaccaaaggtaataccaagtgcatggtaaacgttaatggtatatcactcattgataaaaccttaacccaattatcgaaattatcgttatctcgtattgtaattgtaataggctacaaaggggagaatttgaaaaattatgttggcgacgaatataaaggggtgaaaatagaatatattaacaatcccgtgtatgacaaaactaataatatttattcgctttcgttagcaaaaaaggaacttcaagaggatgatactttgcttatcgaatcggacttgatattcgacgatgcgctcttttcaatgatagttgataattcctatccgaatttagccttggttgccaagtatgaaacttggatggatggtacgatggtgcgtatagatgcggattgcaatatcgtaaattttgtgcctaaggatgcctttagatacgaagatgtagatgtctattataagacggtgaatatttataagtttagtcgtgaattctcgacaaatgaatatgttccttttcttgatgcttatagtcgggtgatgggaaataatgaatactatgaacaggtgttgcgtgtgttgacattgcttaattcatcaactctaaaagctttaccaattcaggatgaaaaatggtatgagatagatgacgtacaggatttggatattgcttcaactatattttcttgtagtgaaactaagtatgaagaatatcataagcgctatggaggtttttggcgtttccctaaattattagattattgttatctcgtcaatccattttttccatctaagcgtatgaaggatgaacttcgtgctaattttgatacattgcttgcggagtatccttcaggaatgtatgtaaattctctgttggcggggaaatactttggcattaagcaggagtttgtggtggtaggtaatggtgctgccgaacttatcaaggttgtgatggaagaacatacacgtgataaagtgggggtcatctatcctacttttgatgaatatcctaaccgtttacatccggagcaaatagtggcttatattccccaaaatactaacttcacttatgcggctgatgatttgatggatttttatgcggataaatcaatttctttattattgcttataaatccggataatccgtctggaaactttatatccaagcaggacgtacttagattggcatcctggtgtgagggtatgaatatacgtttgcttgttgatgaaagttttgtggattttactacgggatatgcagacaatagtttactgcataatgatatacttttgcaatacccaactatgatggttatgaaatccatcagtaaatcttatggtgtacccggtttaagattaggtgtatttgcatcttctgacgtggatttgatagctcgtataaagaaagaggtttctatttggaacatcaattcttttgcggaattctacttgcaaatttatggaaagtatgaaaatgattatgctaaagcgtgccagaagtttatagcagagcgtgaaatattctttagggagttgacgcagatttcgtatttgcacgtcattccttctcaagccaattatttcttatgtgaagtcataaacaaatatacttctgccgaactgacgcaaaagttgatagagcatgatgtcattatcagtaactgtggattaaaatcaaatatgggtggacggaatttgattcgtttggccatacgaagtagggaggataatattaaacttattcgtatattgaaaggactatagcacttggctgtctcttctatactaaatttatctattatgaaaaaagaagaattacagtcggctgttattaatttattgcgttttcctcttattgtaggtgttatttttattcataattataagtccacgatggtggttcaaggagtagaaattgaatgtaatatattcaacattaaggaacatgtggatcattagcaaaataagaaatgacaatagttctaaaatgctgttagccaattttacttatttatcaataattgaaattattggattattattgcctcttattacatttccttatcttattcgtacaattggtgcacaaaaatatggaattattgtatttgcgcagactattgttgcctatttggtaatgattgtaaattttggatttaatgtatcggcaacacggagaattagtgaaaataggcacaatattaacaaaataaatgaaatttactccagtgtaatatttcaaaagttgttgatatttataatagctttagttgtaactataatcattttgtatttatttgattacaaatattcatttattataattggtttaattggtttatgcatccaagaggttttattcccaatatggttgtatcaaggaatggaaaagatgagatttattacgataataacatctatttcaaaatgttcttttttagttcttatttttgtttttattaggtgtgaagacgactatgtatatattccattattatactcatttggaggaatattaacatctctaatttcttatatcttattatacagaaaattaaaggttaagtttataaaagttacaagcaaacgaattattgcagattttaaagaaagtttgccgttttttgcttccaggttggcatctgtagttatggaaagaactaatgtaattgcaattggtacctttttctcatatgaaatggtcgctatttatgatttatgtgcgaaagtcgtttctgtacttaaaaccccctattcattaatagctcaagttatatatcccaatgtctcgaaaagtaaagatctgggtgttgttagacgcactataaaaccaatgattttttctgcaattgtaatttctgtaattatttgtttagttgcacatccgatagtcctattattggggggaaggaatttaaatcaagctgctgctattttacaattgatggtatggtatgttccaattgtaggcgtgtcttttctattcggtgcatctgttcttgttgtaaaagggcattcaaaggaatataatttgagcgttatatattctgtcatactttatctattattaatggcgatattagtattattatctaaagtaaatttatatacaatggtgttaacatttgttgtgcctgaattgtttcttgcaatatatcgaataattattacgaaaaaatacaatcttttaaaaacggattaatatgctatcgaatattcaaaaaagtcatattcttataaatgaacaaggaatcgatttttatacagtaaaagggcttaatgatgttcatcaggaaatgcttaaattattaagtattattgatgatattgcagaaagtaataacataaagtattggattgatggtggaagcttgattggtacggtgcgacataatggttttataccatgggatgatgactttgatatatctctacttaaggaagattatttgaaactaataactgccttagatgatttttgcaagaaaaataaggatgtatatttattttatagttcacctcaaagatatcatacttgtaatttttttgctagcacaagaatctacactagaacagagggttctccaatgttagttcccgttaaagtagatattaggccattaaattgtattaataataacgagagggatatacaagaaaattttattcttcgagatgtcgctaattggataattttcaaaaaaaaatatggttatgcaactgacgcacagataaaatctttagtgtccaaagatttcttcataaattacaataataattatggtttagaagctccatcgaaagacacactattgattcacccttattttgagttttctaataattttaaactaaattattcagatatatttccactgatgaagcataaatttggaacgatagaagttcctataccacgtaattatcattatatactttctgaattgtatggtgactatatgaagtttccagacatggtaaatcgtgctcctgttgcgtgtaaagtttatcgtaaatcagtggatatgctcagatacaaatattattttgaacctaaatttgggatattaatgaattctttaataaacagaatttggattaatttcattcagattaaagattttggaataatcaaatacataaaaataaaattttatgaacaatgagaagatacaaaacttgcgacgtattatttctgaagcacttacgccactaatcgttggtgattatgtattattagatgtaccgaatcattgtaatattggcgataatctcatttgggaaggcgaattacagtatttaaagcaacaaataccttataaatgtttatattccgcaaatgttgaaaattgggaagaatctaaaattaaagatgctgatattatattatttcatggaggagggaattggggggatttatatcgcaaatgccaagatttgaggaattacattgcaaataaatataagaataaacgaataataatcttccctcaaactgtttggtacaacgacaattctttgcttaaagaggattgtgaaatttttgaaaaccatccagatatatatatttgtgttcgagataggaattcatacgaaaaactgtccaaatatcttggcgaaaataaattattattattgcctgatatggctttctttatcgatgttccttttcaatgtactaaaggcagtaaagttctatatatgcaaagaactgattctgaggtttcaaatagggatattttgattacacagaattacgatattagagattggcctacctactcgaataataagtgcatatatcgtattaaatctaaatgggctactatagtaataatgctttcaagacaattacaaaaatgtccaattctacactgttgcgttgattcggaatatggcatttataataaaaaaaatagaatgcattatattaatgttggtgttcaattattttcacaatatcatacaatttacacgactaggttgcatggcttaattttaggcttaattatgggtaagaaggtgataattgttgataataaatataacaaatgtttggatttctataatacatggttaaaagactttattgatgttgatgttatggaaatttgtgataataaatagtgatgttcgttttaataatctcagtatgattaaaactttacaaaaatgcgaaagtgtgccgaaggtttcagttattataccggtctataacgttgagaaatacatcaaacgttgtattgaatcggtattatcacaaacacttcaagattttgaaattataattgtcaatgattatactccagacaaatcaatggatgtaattgaggattatataaaaaatgattcacgcattgtttctgtgaacaactactcaaatatgggtcttatgtggactaggcgagaaggatataaaatagcaaaaggtgaatatttttattttttagacagcgatgatttcattccacgtgatgctttagagaaggtttacaataaagctgttgaagaagatgccgatattgtatttggtaattttcaatatgtggataatgatggaacaaaagggaagattcacaagcatatatttccttacggggcacaaaaggaaggtatttataaagctatgctctcatttcaactattgcattgtgtgtggtcgaagttgtactcacgaaggttatttgacaattataaatatgatacattcccccatcaaacaaatgctgaagattgcatattaacatatcaattaattaaaaatgtaaataaaattagtcgaatagatgatgctgtttattactattttgatgatccaacatcttcttccaaaaaacgtttcacgaatgatgttgtaagacaatatgcattttcgttagcatacgtttacaatctattaaaaacagaattagtctttcgagcggctcttaataggtttatggcgtttcatataagtgctttatgttataataattacgatatcgaaattattaaatctaatattggtgaaaatacaacagaagtcataatgggtctttcgtctttatgcaaatacaatcgcatcggaaaagctatcttgtactggattctatggagaagtaatttgtttcgtgtattgatatataagctacgtcctgtaatcaactatatacggcactaagttattatgcgcattattatattatatctttttgtttttttttctttatttggtgtaaattttgcaggattacctgtatggactaagactaattttatagtaggaataattggactcgtatattggattttattaaaggaaaaaaagagccaaactattacattattgtttatatctggattgctcattttattaacttgtttggcatcaggtataattaatttcagattcgattcttggatattccagcattatatattatgttgctttatttatgttttcaatagcttcattataaccaaatgggctataaaagcaggggtggatttctatggtatattaaagattactataggctgcatcttcattaataatattttggcattatctgctttttatcttccatctttggcagatgcaattttgtcagtacaggatttttcagttgccagttttggttatgactatggtgttaggcggatatatggttttggcgatggaggaacgaattttggcggaggtgtaacttgtagtatcggcttgatatttgcagtttttctatttgtaaataataaattgggtttaattaaaacaatcatagttgtcttattcttgacattttccggcattttaatagcaagaacttcggtattaggtgctgcttttgcaattggctcaattacattatataaatgcgaaaaatcaaaaaaaacatattttataatctcaatcatgttgatatgtattgtttcatttatgatattattttctctctttggcgaattggatgcttttcaatacagttttgatatgttcaccaattatgagtcgggggggggactttcgaatggatctacggataagttgtttaatgaacattgggcaaagttgccgcatgatataaaaacttggttgtttggagattcaagaatgcttgatattcatgggagtggctattatatgcatacagatgttggatacttgcgaatgattttttgttttggtattaccggcttagctttttttatagttaatcatatcattattattaaatactcccacaaaatactgaatgacagcaatacatacagattggttattttactattcatatatatactaatacttaacataaaaggtcttgtagattccttattttggataatggctcttcctttgttttactatgagatgtttcaaaagaaactaagataatttaattatgaaaatattgcatattgcgtctgaatgcaatggtggtgtactgtcatttattgaaaatttatcgttaaatattagtgatgatcaaataacgttactaacatttggtagtattgataaaatcagtgaacttgctaaaaataaaataaagattatccatattccatataggatttacagtataaaagcgttttttattttatttagagctataaatcaagctgaagtagtacatgtccatttatttccaatgttatatatctgctctgttttaaagtcgttttttagaggaaaaacatttatatatacagagcatgcgtcgctaaataatagacgtaaaattaaacaattaaggaatatagaaagaataatctataggaactatgacaaagttgttggggtgtcagaatcgtgtagcgaagcactgcgtgcatggattggcccaatggataatatagtgacaatatataacggcgttgatcttaacttaacaagacaacaatcattacaaaatatagactttcgcccatataccaattatacaataactatggttgctcgtctaagctccgacaaggattttgaaactcttttacaatcttttaccctgcttgataataactatcatctatacctcgttggagaaggagatttaaggaaaacaatccaagatatgataattaaatatgaacttgtagataaggtctctttattaggctatcgctccgatgtccctgctatattaagacagtcagatttatcagttctatcaagctatggcgaaggctttggccttgctatcattgaaagtcttgctgttggaacaatttgtttaggctctcatgtgtcaggtataaaagacatattggattcagaatatttatttgaattaggagacagtaagacgttggctgaaaaaattatgaaatactgtaatctggatttgtcagagaaatgcaaaaatatggtgaaggaatatgacgtcaacaaaatggtgcaactttataaaaaggtctataataatgctatacaataatagcgtttacagagtttaatgtcaagtctcaatacttcgttaataaataaaatgtaataatctcaatgaaagttgaagttttttaagctttaactttttcattggaaatgaaaattagttcaacttatgaatatagctgttgtcggcactggttacgtaggcatggtgtctgggacttgttttgccgaaatgagaattgatgtcacgcgtggatgtcgaccgggagaaaataaatggcttgctagaggggtggtttttaaagctgttattttcaaaagaatataatgctgaaatgaaaaatttattgaacttcccaaatctaaaaataaaaatcactacgttattacttgatatctctcctcgtttattctattatatgtttaaaatgttgaaattataactttttatgggcttagaacagatagcaaattatcaattaaataaatatcctgtaataaaaaatggtgaaacgatgctatcaattattgatgtatactttatcgtctaaaatgaggttcaagggtaatattctaagagtatcgccatataataaagcggaatgctttttggggtattacgataaatcatcatgggatgctactggcaggtatatgctttgcatgaaagcaaaggatacttggagtaatgttgtgccattagtagctatagaattattattgattgatacaaagaatgggaatagggtaagaaaaatcgggggaaagccattcgtggaatgtgcaacaagggtgtatgcttcaatggttaggacctgactttggcgagcgggtaatttataatgattttcagaaaaatcgtttttgtacggtaatttaaaaaaaataaagacaggtgaagaacgtattatagaacagcctatttatactatttctgcagatggagaaatggctttatctttggactttacgcgattacataggttgcgtaggggatatggttatgctaatattgaagaagtgactaaaagtgaaaagttaccaaatgcgacttgtatatggaaaataaatttgaatactggtaacattaaaccattgttgaattatgcaagttttgtacagtttgaatatcgcgatgagatgaaaagggcagaacataaagtgaatcatttgatgattagccctaatggcaaacgatttttggtattgcatcgttggtttaacaatcatcgaaaatattctagactagtgatttgtaacatggatggtactgaaatatataatcttagtgatgacgatatggtgagccactgctattggaagaatgatgaggaaattattgcttttgagaataaacatggtagtggaccgggctattatctgatgaaagataaaacaagggaatataaacatctatggaaagaattgtgtgtagatgggcatccaagctattctccagatggtaagttggtggtgacggacagttatcctgatagaacgagaattgtatctgtacgtattatgcgggacaatcagatagaagtggttgtacgggtatttgcgccgttccgttatgacaatgatacacgatgcgatttacacccacgttggagtagagatgggacaaagatttgctttgatgctgcttttgaagggcatcgtagactatatgtagtagatattaaagcttaaggatgtttcaagattataatatagctgtgcttttatccgtctataagaatgatagggcggaatttctgcggttgtccatagatagtattctaaatcaatcgtataaaaatataatactatatataggggtagatgggactattggtgagaaactatataaatgtttagagcaatatgaacaagaaaagagggtgaatattgtttatttcccagaaaacagaggacttgctgtggtgttgaatgacttgttgatattatgtaaagaagcgaatatagagtatatagttcgtatggatgcagatgatatttcagtacctaatagattagcgaatcaggtgaattatttactattgcatcctgaagttgatgttgtaggaggtcgtattgaggaaataaacgaacaatctgaaagaaatggcaagagtgttacataccccttaactcatcaagaatgttttaaattctttagatatcgtgatcccttagcacatcccgccgtgatgtttagaaaatccttttttgataaagccaaaggctatcggaatgaataccgtaaaaaccaagataccatgctatggtttgatggatttatgaatggatgtatttttgcaaatctggatgaaacggtattactctttcgtgtcactgacgatttctataagaacagaagaaatggttttaagcgggcgaagaaaatgttgaaagatcgatttatgataaataaggctcttcactatgattggtctgcttacctcttttcatttttgatgtttataatgactcttactcctccatttttgaagaagttcttgtatcggattagatgaaatttagaaatctctgtttacttctgtttttttgttgttattcggtatatttatttcctcaatattctcatggagttacagggttgttgcattctccttcggcggaaatgcagcaagataaaaccgttatgattggtgggggatttttaaatgagaacttaactcctcctcgatttaattataatacatataattactacttgaatgtaaccattttcccctgtttggaaatagcatatacttgtaccctttttaaggtaactcctcaatggggagtgcaatctcaaatgggaaagttcactaatcaggatcggtatttctcgcttcggttaagggttttgaaagaagaacaattctttaaatatatgccagcagcagttttaggcacatctgatccgtttacagaaagtaggggtggagagataatgccttcgggcgatggtggtaatggatatttttctcgcttttatgttgcaatgacaaaacatattccagtaaataaagaagaattaggactacatgtatcttatctttataatcgccgtaatgattaccatctgaatggcattgccggagggataacttattccccttccatgttatctgatttgaaattaatagctgaatatgattcacatgatattttgataggaatgaattatcttctctttcatcattttttggtacaagcaatgatgcagaaagggaaatatttctcctgtggacttacatatttgattcatttaaaataattcgatataatagtagatcatgaaaattccattttcgcccccttatattgacgaggcggtcatcaacgaagtcgttgattcgttacgttccggctggataacttccggtcctaaagtaaaagcattggaagaagaaataaaagtattctctaatgcaaaagaagtgctttgtgtaaactcatggacttcgggagctattatgatgcttcgctggttgggagtaacagctgaagatgaagtgattgttccggcgtatacatatagtgctacggcattagcagtccttcatgcgggtgcaaagcctgttatggtagattccggagaggatttcaatatctctgtggatgctattcgaaaagcaattacgccaaggaccaaggctattattccggtagatattgcgggcttcccttgtgattacgaccgtatcatgagactcgttaatgaaccggaaatacgcaacctgtttcaggcgacgtcattggtacaggaaaaattgggacgtatccttgttatgaatgatgctgcccattctttgggtgcttattataacaagaatcagcgtacaggatgcgaaacggatattgctatcttctctcttcacgccgtaaagaatgtgacgacggccgaaggaggagccatctgcctgaatttgcccgaaccgtttgataatgcggaactctacaaagaattgcgtatgatgagtttgaattgtcaaactaaagatgctttttccaaatccaaagccggcggttggcgttatgacatagtcggtctgggaatgaaaataaatatggctgacgtaaatgctgctatcggtttggctcagatacgggaatatcctgaactactgaaagaacgtaaaagagtattcaatacctattctaaagcatttgctgattgtgattgggctattttgccaccttctgaagatggagaaaaagaaagctcatatcatatctatgcattgcgtatcaaagatttcacagaggaacagcgtgatcgtatgattgatgaaatcgcgaaaagcgaggttgccgtgaacgttcattttatcccgatgccgatgctttccttcttcagctcattgggatatgatataaagaactatccacaagcttatgagaattttaaaggtgaaatctccttgcccatttatccgcagttggatgaagaaaagctggactttataatcaaagctgtaaaagatgcataccttaaagtgactgttgataggtgatgattcgtttttttgatattttattttcctttctgggcattctattcttatctcctgttttccttttcctgtatattgctatccgtctggaaagtaaaggtggtggtttctataaacagctacgtgtaggacgtggagggacggatttttatgtctataagttccgctcaatgcgtataggagctgataagcaaggtttgataactgtaggcggacgagatccccggattaccagtatcgggtattttatccgcaaatataaattagatgaactacctcagttattcaatgtactgaaaggtgatatgagtctggtaggcccgcgtccggaggttcgtaaatatgtggaactctacactgaagaacagcggagagtgttgtctgttcgtccgggaattacagattatgcatctatagaatatgtagatgaaaatacgattttaggacaggctgaggatccggacaaggcatatgtagaacaaatactgccggataaaatatgctacaatatgaaatatatagagcatcgttcggtgaaggaatatttcaagattatatttctgactatatggagtattgtacattgatcaaatcggtaataaaggttatgagatggttgtttattccatattatgtttggaaaaagtagtttaaaataagatatagaaaaggtcgaagctcagtttcggcctttttttattctttcaacaccgacgcttgtgacaacctcaaactactcaccaccgccgcaatcagcgcaaatacactccctgttatcaagcatacttccgtacttttgcttcctaccacccaactgaataagagtgctacaagcgtagttccgagagtctgtcccataagtcgtgccattcccatcattccgctggctcctcctgaacgtttggtcggggcagatgcgattatagtactattattcggtgtctggaaaagtccgaaaccaatgccgcaaaggactaaccgaaagcagatactaagaatggaagattctgcatccagcatggagagcgagtaaagcccgatacaaaatatccccatgccgatacttcccaatattcccggatgaatacgctccaccagataaccggcaaccggtgcggcaaataaagttgcaagaggccagggagttaataataaaccggtcatcacctcgctatgccccaacgtattctgtagaaagaaaggcaatgaaatcatagccagcatttgtgcggtgaatgaacagatggatgtcagtatcgagagcctgaagatgggaatctttagcaaatccaaaggaagtaggggagattcctgacctaattggcgacgtacatagtaagtacctacaacaattaatatcactaattgaagaatcagataatcatagcgttcatgatgcgcaaaaccatccaatgtataaatcaataatccgaaagtaatagcattagccaccgcactgataacgtcaaacttacgtttggacagctctttttgttcaggcagatacttgatccccaatatcagggcaatgatccccaatggcaggtttatcgcaaataaccagtgccaggaagctattgacaaaataccactggcaacagaaggacctgccgccgccgatatggcaattaccattgcattaattcccattccacgtcctatctgttttttcggatagataagacgaagttgggctgtatttacactggtgatggctgatgcactgaatccctggaaaatacgagcggttgtcagagtccagaaggaatcggataaggcacatataagtgatgtcacacaaaataaagcaattccggagagaaataccttacgatatccgaagatttcgcccaatgcagaaaaagaaagtaatgacactacaatagccaattgataaccgttgacaatccaagtaatcatagagtccgaagttccaaaatcatgtgcgagggtagggaggattacagtactgatgttgatatcaagcactgacatgcagagagcgaatccaatgggcactaccgcccatattcgttgcggaaatggcagcccgtccgtttcgtctatttcctgtgattttccatcctgaaccatatcatttcttttatctgcgaattgaacaaaacgttcaatctgctgttcggaaacctgcataaaaataagtttttttagaaattgtctcgtaggaaagtaacgtggagaagaaacttctttgtacctttgtgcccgtcaatactaaaatcaataataaataataggatttatgggaggatttttcgggacagtctccaaagcgagctgtgtgacggatttattttacggtacagattataattcacatttaggaactaagcggggcggacttgccacgtatgatgcagaagagggcatgtttgcccgatccattcataacctggagagcacttatttccgaaccaagtttgaagacgaactggataagtttaaaggaaatgtcggaataggaatcatcagcgacacagacccgcaacccatcatcattaactcccacctcggacgcttcgccattgtaacagtagccaaaattgtgaatctggaagaaatagaagcagagctactttcccaaaatatgcacttcgccgaactgagttcaggcaataccaatcaaaccgagcttatctcactactcatcatacaaggaaaaacttttgtagaaggtatagaaaatgtttaccgccgtgtcaaaggctcttgctctatgctgttgttatcagaagatggcagtatcattgcggctcgtgacaagtggggacgcactccgattgtaattggccggaaagaaggggcatacgctgcaaccagtgagtcaagcagtttcccgaatctggattatgaaatagaccgctatctcggtccgggagagattgttcgtatgactgccgatggagtggaacaattgcggaagccggaggaaaagatgcagatttgttctttcctgtgggtatattacggttttcccacttcctgctatgaaggtcgcaatgtagaggaagtgcgttttaccagtggcttgaagatggggcagaacgatgattctgaagtagattgtgcttgcggtatacctgattccggtgtgggcatggctttaggatatgccgaaggaaaaggagttccttatcaccgtgccatttctaaatatacaccgacatggccgcgcagcttcactcccagtaagcaggagatgcgctcattggtggcgaagatgaaactgataccgaaccgtgccatgctggaaggtaagcgcttattgttctgtgacgactctatagtacggggaacgcaactacgggataatgtgaaggtgctgtatgaatatggtgccaaggaagtacatatccgcattgcttgtccgccgttgatttatgcttgtccgtttgtaggtttcacggcatccaagagcccgttggaactgattacacgtcgcgttatagaagaactggagggagatgcagacaagaatctggagaaatatgccactaccggttctccggaatatgagaagatggtcagcattattgctgagcgctttggacttacaactttgaagtttaataccttggaaactctcatcgagtccatcggattgccgaaatgtaaggtttgtacacattgttttgatggaagtagttgcttttaagtaactctaaatactaacattttgtaaaaaggggcgtgaattgcttggcagttcacgcccctttttctacctttacggcagaactattgactactgttgatagacaattggtagttcatattcttaatcgtaaattgaaaattattaaatcgtaaatattatggctttagtagaacgttttttgaagtatgtaagcttcgacacccagtccagtgaagagacagaggtgactccaagtactccggggcaaatggtatttgccaaatatctgaaagaagaattagagtctttaggtttggaagacataacgctggatgagcatggctatttgtttgccacacttccggcaaatatcgataagccggtacctactattggttttatcgcccacatggacaccagtcccgatatgagtggcaaagatgtgtctcctcgtattgttcaaaactatgacggctcggacatcgtgctttgtgcagaagagaatgtagttctttctccgtctcagttccccgaactgttggatcataaaggggaagacctgatcgttaccaatggtaagacattgttgggagcagatgataaagcaggtattgccgaaatcgtttctgcgatagtgtacctgaaagagcatcctgaaatcaagcatggcaagattcgtattggtttcaatccggatgaggaaataggattgggcgcacataaattcgatgtggagaagttcggttgcgactgggcttacacaatggatggcggtgaagtaggagagttggagtttgaaaacttcaatgcggcatctgctaaaattactttcaaaggccgcaatgtacatccgggttatgccaagaataagatgattaattcaattcgtgtggccaaccgtttctgtgcgatgttgcctgctcatgaaacacctgaacatactgaaggttacgaaggcttctaccatctcatcagtttcaacggcgatgtagagcagactacagtggcctatattatccgtgatcatgaccgtgcacgtttcgagagccgcaagaagaaaatagaacgctttgtcagtgaaatcaatgctgaatatggtgaaggtacggcaacacttgaactccgtgaccaatactataatatgcgtgagaagattgaaccggtaatgcatatcattgatacggcttttgctgcaatggaggctgtaggtgtgaaaccgaatgtgaaacctatccgtggtggtacggatggcgcacagctttctttcaaaggtttgccttgccccaatatctttgcaggtggtctgaacttccatggacgatatgaattcgctcctatccagaatatggagaaagcaatgaaggtcattgtgaagattgccgaacttgttgctataaaataatttaataccttaagacatgaaaaccactccgtttacagaaaaacatatcgcgctgggtgctaagatgcatgagtttgcgggatataatatgccgatagaatattccggtatcattgatgaacacctcaccgtttgtaatgctgtgggtgtattcgacgtttcccacatgggagaattctgggtgaaaggccccaatgcgttagcttttcttcagaaagtgacttccaataatgtggctgccctaactccgggcaaggtgcaatatacctgttttcctaacgaagaaggcggtatcgtagatgacttgctggtttatcattatgagccggagaaatacctgttggtagtgaatgcttcgaatatagaaaaagactggaactggtgcgtttcgcacaataccgaaggtgctgaattggaaaatgcttccgaccacatggctcaacttgccgtgcagggaccgaaagccattcttgctttgcagaaactgacgagcataaacttgtcggaactgccgtattacacctttacgcatggtgagtttgccggtgagaaagatgtgattatttccaataccggctataccggtgcaggaggttttgagctttacttctatcccgaagctgccatgaagatttggaatgccgtgtttgaggcaggtgaagaatttggcatcaagccgattggcttgggtgcacgcgatacgcttcgtctggaaatgggcttctgcctgtatggcaatgatctggatgatacgacatctcctattgaagccggtttggggtggattaccaagtttgctgaaggtaagaactttatcaatcgtccgatgcttgaaaagcagaaaacggaaggtactatccgtaagttggtcggttttgaaatggtggaccgtggaattccccgtcatggatatgagttgttcaatacagaaggcgaagctatcggagtagtaacttcaggtactatgtcgcctactcgcaagattggtgtcggtatgggctatgtaaaaccggaatatagcaaggtcggtacggagatttgcattgatatgcgtggacgcaaactgaaagcggtagtggttcgtccgccattccgtaaataagaggagtctttttcaccacagattacacggatttacacagatatttatattgataatttaatctgtgtaaatccgtgtaatctgtggtgaaaaagactttataacattctttcctttatagtctgttgatcttatctaataattgattggcccaggctatttctttgcttgtccattcttcctcttctccttgcactccttgttcctgataccgggaaagtaatcccagatattccttcaatgtgccggcggctttagcctgtttattcatgcgcattagcaatagaatctcctgtttatatatgtcaagattcggactgtctcctgctaattctttggctttccaaagcagggtggcacattcttcgtttacctcttctgtgttgtaaagcgccatccgtgatttcgctaagataacgtaatcatggtcggtggccagatcgttattgatattcttctgtattaaccttccggcttcttcataccgttggtctgccatattcatggctgcgttgaaagtcactacatccgatgtcgctttgagataaggatgactgatttgtttttctgcctcaccggctttgtctattcgctttttcaggttatcgatgctgccgtaacgaagcagcttatgaccacgttgctgtatattatagtaaccgatgactttggaaagtgcagacgccaatccatcgggattcatccccttgaattccaataactcacgtgcaacccggtcggctgcgtattcctggttatttttgtaattcattcccaggcgattcactacatttacattcagcagggcggcaatgcttccgatgctggcaacagcgcctacacctaaagccgtatcatcgtcatcccagtatgccacttccagagctacttcggcagtgacggcaagaaccgttccccaaaaagctgcccgcttggcacggcgttcagcacggtagatgttattaacctgatggtccagcacaaaatgagacatctcattggcaataatggcggcaagttcatcctccgaatcaagtgtgcagagcagaccggtactaatcagcattgtgccgttgggcagcatgtaagcatccggttcgggcgactggatgacgcgtacattcaaccgttcgctgcgattgggatctatgccggtggcagtcagtttagcaaagatattctgtacgtacgaagtgatgaaatcatcctcatagccgatctcttccagcttgtacaggtagtcccgacattcttcgtccacttccttgcgcaacttagagttatatccgcgttcgccaaaatactcatacagatgctgtttcaggtaagtttgctgccaaaactcctgattggtttcgggaggtgagagtttaatggttttcagagcagaagaaggtactgcgaattgtataccattgatttcggttgcatagaaaatgtcgggacctgcctggtctgccgatttcattttcactaccttgcggatcactacgggagtgccggcaggaaaattctcatactgttgttgtagttcgccttttatggcaatcgggccgctcaagtctttctgtctggcagcaaatcctgccgtggagaggaggacggcgaggataacgaaagtgataagacgtttcatatggattcgtttatggtttgtacaattgacttgcaatcaaaattgctgatacaaaaataggaaagagttttctctctttcccgttcttttccctacaaagtgatagggaatttcctataataaaaaagggaagacttcgtgaaagtcttcccttttttaacttcaaaagaagtcaattttatttcttcttacggtcaccgtagcggctcatgaacttatcaacgcgaccagctgtatccaccaatgtagatttaccagtatagaacgggtgagaagtgttagagatttccatctttaccaacggataagtttcaccttcaaactcgatggtttctttcgtatttacggttgaacgagacaagaacatgtcaccattagacatatctttgaatactaccggacggtaattttcaggatgaataccttttttcatttcaatatttgtttttttaattattatattcggttactattttggtaataaatagtgtaatggtcttatttttcagagcgcaaagatagtgcaagtcgcagataatacaaaataaattcagatttatttttgcttaaggtacagtctacctttgtttaaaggcagtgcatttctccgaattagaaaaaagttccctcaaaaaataggtttatcgctttttatttcagatttttgcatagtattttaatttatattcagcatgaagaagctacttttcttaatttccctatggctctgcgtcactacggcaggtgcccagcagaacgagcgggatctgtatagtgttgcgttttataatcttgagaacctgtttgatacgattcatgatgcaggtaagaacgaccttgaatttttgccttccggcagttatgcatggacggctgagaagtatgaggccaagttgaagaaccttgccaaagtcctgagtgaagtatcgcgcgaccgcgtacctgaaggacccgccgttatcggtgtagccgaagctgaaaacaaccgggtattgacggatttggtaagccagccggctatatccaactataaatttgtgcattacgaaggtccggataaacggggcattgattgcgccttactttatgatccggaacaattcactgttaccaattccaaactggtgctttccactccttttgagggggacactgtgcacctgacgcgtggtttccttattgtagacgggcagatggcaggcgaacgcgtttgtttcatcgtcaatcactggccttcccgtggagctaagtctccggtacgtgtacatgcagccaagcaggtgcgagcattgacagactccctgatgcgtacggacaagaaactgaaactgatagtcatgggtgatatgaacgacgatcccatggacgaaagcatggctacactgggcgcacgcaagtatgcaaaacaggtgaagaagggcgaattctataatccctggtgggaaacccttgaagataaaggcgtgggaacattgctctatcgtggcaagtggaacttgttcgaccagattgtagtctcccgtcctttgctgaaagccaagaaaggtttgaagtacgatcataatgaagtctttatccgtgaatacctttttcagcaggatggcaagtataaaggttctcccttgcgcacgcatggcggacgtgtttggttgaatggctacagcgaccatttgcccactatcatttatttgaaaaagtaatatataataatgtgtaaacgaagaccgggaagctaaacttgctttccggtttttttgttatctatataaaggtatgcagaagaggctgataaaggctacagatgaaaagagtttgtaacatagagattacaatattctgttaaaatcatccaatagctttaaaatagaattgtttcaatggggataatacgataatttattcccaacctgttcttccatttgaaggataatgcttacttttgcgtagaatttttattcactaacaataaactttaaacaaaatgattaattacaaagatttagggctcgtaaacacaagagaaatgtttgcgaaagctattaaaggtggatacgctatcccggctttcaactttaataatatggaacagttgcaggctattgtaaaggctgctgttgaaaccaaatctccggtaatcctccaagtatctaaaggtgcccgtcaatatgctaaccagacattgttgcgttacatggcagaaggtgctgtagaatatgcaaaggaactgggttgcaaacaccctgaaatcgttcttcacctcgaccacggagatacattcgaaacttgcaagtcttgtatcgatatgggcttctcttcagttatgatcgacggttctcacctgccttacgaagaaaacgttgctttgacgaagaaggtagttgactacgctcatcaatttgatgtaactgtagaaggcgaacttggtgtattggctggtgtagaagacgaagtttctgctgaacatcatacttatactgaccctgaagaagtaatcgactttgctactcgcacaggttgtgactctttggctatttctatcggtacttctcacggtgcatacaagttcaaacccgaacaatgccacgtagatccgaagactggtcgtttggtacctcctcctttggcattcgaagtattggacgctgtaatggaaaaacttccgggattccccatcgtactgcacggatcttcttcagttcctcaggaagaagttgaaactatcaacaagtttggtggcaagctggaagctgctatcggtattcctgaagaagaactgcgtaaggctgctaagtctgcagtttgcaagatcaacatcgactcagactctcgtctggctatgactgctgctatccgtaaggtgttcgcagaaaaaccggctgagtttgacccgcgtaagtatcttggcccggctcgtgacaacatggaaaagatgtacatgcataagattatcaacgtgcttggttcagacggtaaattggctgaataatccacgggattttagactgaatagaaggctgctcttgaaaaagggcagccttttttcgtggtcagtagtcaagccggctgttcattgcctcagaacaattttatagagtgctatgaggttgaagtatggctttaagtccgttcatgcgaaagattctctattcgcgatgtgatttcttctttttcaccttcaagcaatcgacatggcattatttgaagcccggcatccttagccataaggtaatgtcaatatttcagtttaatggtgataagctggaaatcttgaagatatttgctccgggtatctttgctcggagaataatgacgagataatcaatgtacttgatttacatttatagtgaagagaaggatagaggattttagatataaatcgataagtaataattctagtcaattgtaagtgccccattaataactgtaatcagcgtttttaaagaataatatctatgttttttaagaatgttctctgcgtttattaacagcgcaaaaacaggtagttaggcctaaaatgaatatatatcaacaaaagaggcagtaatccttgtgaggaaatactgcctttttatcttttatactcgttattatttggagtataagttttctgaattcgctataattagttcagatggtttgggaataagctatcagtgattatatgtttgatatccggttttgctgaaattattgtcatatttgttcgcttaataatactttgctgtaaggatattgtggtattcttcagaataaaacgtgccggaaaatgcattccggtaagttcggagaaaagaaaaggtaagtttttccattagctaaagttttaggtttatgttagagttctattcttaaacttctacaaagatactacataagaaaggtgaagtcaagtttttcagccctcattttaaatcgtttttctatttatgatgctaatcttttgattaatagtatttttcaattccgccaaatcctataatcgttttgttttcttttgttttgctaatgaagttatttaaccgcttctcaaattcttcaggacgttttcttgcggcttcgatgtacgctattcggattcgcttatatgcttcggaaaatggttgatagtttttccataccgtttcatcttctttcattttatcaattatatcattgggaaaaatgaaaggctcagataaaatacttcgcgttttctcttcaaattttggatgtatcattttattttccaatagccatttaagtctttctttgttggcttgcgagtaagtgcttttagaatttctgggtgtaaaacgctgaattttatgatctttgtcaagtggcttggttgtgctgtcaatccaatcgaagcaaagggcttcttcaacggcatcattatataaaatgccttttttacctgatgacttatagggaaatacaaaccatatttcacaggaggtttcaaagttgtccattaaccactttctccaatcttctcgattttcaaaatactttattttattttctgtagtcataacaggtattcaaattgattattttatagctttactttcgtgataatgaagcattttgttaatttactttttgcctcagcaatttctgtatgtagcgcaattactattttccacgatagtaatatgcaggcttcgatagtttaacggtttattacagctgccaaaaatactaaatctttgagaaaggcctccaattatctcttaaaacctttaccctgattcgattgaacttagccaaaggcttgatatgaatcttatttatgcttatgaggtcactgattcatatttaaagttaccggagcagatgatatcatatatttgttgagttgtcttatgcagtatttcacaatttcttgcatttcttaaaaggtgagactgcttacacactaaaaaactaaaatatgaaaaacaagttatccgttttactggcactactttttttgctttgtacggcaatgtgctgcgaggaatttgaggaatacattccctgtcaggtgaccttaaccggaataggtaaggtggaacacttggataatgccggaagcgtgcctgttgctccggtgggtggagtggtatctcgccaggcatatatgttgcggatacccttagactttgaatatgagaaagagactgtagagggaacatattatgaatacatcctgactgataccatcgccaatatacagattatctcacttaccgcttatgatgaatcccaccctgccggtacggatgtgaacgaacttttcatgaactatcctttgcgtcaggaggatcaattgacagattataaatacggttacatgtatgggactgttttttataaaataccccgtacacttcctcaatccggagtgcatcggtttaaagtcgtagtgacgacccgcaaaggggaagagtttaccaaagaaacggatgagatcaccatgcaataaatggagaggcaatgaggaagctatttatcactttgctggcagtgggactgctgagcattatgggcggacaggcacaaaatagaagttcacgtcatcagcttgacttaaccaccggagtatcctgtcattttcagagtggagaatcctggatttcttcttctcctgttcccgtcatgagctttgcttatactttctatgtacttccacactggggaatcttttcttctatgagtgtggcccccctcatcagagaaggaaatggggataagttgagaagaccttataaaaatgaccattttgtaaaggatgcgtatgattttgatgatgaaatgggtttgtctatggcctttggcattgcctatcggctgaataaaccggtatgggatgtacagttgcgcttgggatattacctggttgatgcagaggaacattcttctcatttttatgtgaaagaaaagaattccaatgtagtacgttggattaattatgatcagtcattctccatagaacccggtggtttaatgagtgctattcagacttcggctatgttgtcgaggcgtatctggcgcaaactccatttttcggtggaggccaaatatctcttcctccctgaacgggctacgcagacttttgaaaagagaaacctgctgacaggagagattgaggatagctactcgaaacgtgtacgtgtgcactatctggagatggcatgcggaattagctggcatttatagccggccaatgacagtacgtaaaattctatagttatacttcccaacaacgccatcccttgtttgagcaaatataagctacatacgtgcgtacatgatagttggggaaatgtttctgtgtatcattggcatagcggtgcacctgttcgacgtgttcgggcaggggagcatccaatgccaacatcttctcagcttcccgtgctttgtagtatttgaattctaccagacgatcatcagtgtaataatcagtgccgggaatacctgtcatctcaaagtctgcacgaccttctgaattgttttgctcaatagcgaaggtgtagcaactgctcaggtagcgcgataccagttcgaagaaagaacaacggatgaaattctcattaattttatcgaacacctgtgcggggaactgtcccagatattcttcaaaataattctgtatcaatggttccagacaacggtcgttgacaaagcgttcgtaagtgggtacatagcggttggcgccaccgtctatgcggttcagtacgttataataatccatgtagatgctgcgcatggtcaggttgggcagtgccatgcggtaattgctctgcaaggtagtcatgcccagatagaaaaggctgatgggatagaagttcttgtcgaagaacttctgtttgttgaatttgctggaaagatcagccatgttgtaggctaatccgttgtctattatcaatgcgtcaagcatagcttttgaatttgccagcgaaagtgtgagacgccggagccagttgacatcggttcgaaggttctcgtcgatcatttcatcgggtacttctcccttgttcacggcaaatttcttcaggaagtaagttaatatggtagcattgaataacttttcaccacgggtgctgaagcggtaaccatcgtaattgttgacgatgagctgccagatttcatcgaagcgcttctggcttcctgtgtatttatccagcacatagcgtagataggtctctgtctcaggataagtgaatcccagcatgttgatgaagtctgattccagcgtcagtatttcggctatgttgtagccactggtcaggtcgtccatggttacgggaagcactcctgtgcagaagcaagtgcggatactgccttcaccgatacctgctttgattaccttgaagaaggtgcgtaggaaactgtcgcaggtagtgacttgttcgtatagtggatcgttgtaagaggtgagtagttgattggtgaaattgtcatattcgtctatcagaatatagactttgggaagtccgtgtgcacgggcataacccagaacttcttcgagcattttagaagcatttctgtgggcgttgaattggaaaccaccgaagagatcgcgattgtgtgtcaccatgatttcgacagggctgcaattcaaatcattgaagttttgttccaatccctctatactgtttgacatcaccatctttgagaaatcgtagcgtatcaccatatattggttgtgttcaggcgtaggctgactacctatgtaggtgccaccgaagagttcttcaaagcgatgcgccagagtgcggtcgtaatagtgtgccaaggtagatacccagagactcttgccaaagcggcgaggtctcaggaagacaggagccttataactctccaaccgtgagatatactttgtcttatcgacataataaaagccgcgctcgcgcatttctgcaaagtcagctactgcgtatggaattgttattgttgccttcattttatctctattctacacttgacagacacaaaggtatagaaatttttgttgtttttcaattcaggtgcaaaataatagagtattgctttataccatatcgtctcccgtcttcaccacagccactttcagtatgcttttatgaataaagaaagggtatagaaagcttatttctatacccttctgttataattaaaatacgatttataattcgataaccaatgattctcttggtcccattgtcagcgattcaccgaatgcaactgtctttccactaagaatatcttttccttgtttggaatctttcaatatttctttgtagaatttcaaaggaacagtagtttcggcatctgtaccattcaacattacgaatacggttttaccttcgtgctggcgggcatacgcgtaaacaccattctgaaccatgaattgcaccatgctacctttggcgataacatcgtttcctttacgccagttcaataaggtcttgtagaagttataacattcgttctgtatcttgctgcgtcctgcggctgtcagtgcagtttctgtatcgccagtccatccaccggggaagtccttacgaacgtatccgtcactcttgctcttcacaccgttcatcatgatttccgtaccatagtaaagttgcggaatacggcgggtggtaagtagcagggtagaagcttgtttcagcattggcagattgtcgccttcacccaggaagcggtcggtatcatggttttcgataaatgccagtacggaagcagggttggggtagaggaagtcgtatacgaagctattgtacacgcgatccagacctttgaaccatgtttcggtctgctcgttcttggcagtattgattttatcgaagaagctgaagtccataacggttttcaggttactgttctttggggcagagagtttggaatccatttgccaccaggctgtataagccggttcggtaacccaggtttcgcctacggtgttgtagttggggtattcttcgttcagctctttcatccagttgctcatggcgtcatagtcggcatacggataagtgtccatgcggataccgtcgatattggcgtactcaatccaccagaagctgttctgtaccaggtagcgatatacgtgcgggttcttttggttaagatctggcatagcggtaacaaaccaaccgtcgttcatctggtcgaagtcgtattgtgaagtataaggatcaacgtgcggagtcagtttgaaagaagtctgcacgaagttcttttcatgatcgggattgttgaaccagtctttagatggcatatctttaatccatggatgctctacgccgcagtggttgaagatcatatccattacaatcttgatgccgcggtcgtggcatttggatatcagttgctgatactcttcgttggtgccgaaacgcggatcaactttatagtaatcggtagtagcatagccgtggtacgaaccgccggtcatgttgttttccagtaccggagtgaaccaaagagcggttatacccaggtcggagaagtaatccagattttgctcgatacctgcaaggtcaccaccatggcgggcgttcggatcattgcggtctactttgtattcggccatgccggggatttggtcattgtccggattgccgtttgcaaagcggtcgggcatcaacaggtagagggcgtcggaagcatcaaaacctttgtgttcacagcttttcttgccgcgtgctttcagttcatactctttgacgattttctttttgccttgtgcaaaagtgagagctactttaccgggtttcacatctttctccagtctcaggtagacaatcaggtagttcgggctttccagcttgacagtgctgctcaaagaaacgccgggatagttgacagtaacggaagagttaccgatgtcttcaccgtagaccataagttggagttcgggattttgcattccggcgtaccaaaacggagggtcgattttgtttacgttcatagctgcatacgtactaagggaaagtaaaaacgttcccaggataaggaataattttttcatgatattagcttttcgttattatatccgtattttggtgctaatataagcaaatagcggagaaagctgccgctactccgctattatatactttataatgttatgcaaacgttttcacttctttactgtgtctctggaagtttctgtctttttcatatttgttggtactgcaatcactttcccctgaaagaagtcatccactttctttttctcgcgaagatctttcagccaagtttcggccgcaccataataagtacttaatcctaatattacatttcctttatcatctgtttcgggttgctcactgctgtttttgggacgcgttttaaggaaagcctccagacaacgttctgtattctttttatctttcaactgatattggtaaacatatgccatgtcatacaagagcttatgattttctatatcatatttatcatatctgtcttgcatcgttttgatttgctctttaggcattagtgccattttatagcagtctgtgaggccgacatagaggcgtaccatagcactatcgggtggggtagcatatgccacagcttcttccagatatgcaactccttgatccttccatgacgttttggaacaggagcgtcctaaataatatagcagattcacattacgcttatcatattggcgagctacttccagtatatcatgtgcttcataaaacttttctactgcgtagtaactgactcctaaataataacaggtggtaaatgtactgtcccctaggcttagtaactgttcgtatctctgtattgcggtctgataatctttcatcaggcagtatgccaatgcattttgttggtttacaataacgtttgtactgtctatttggcggtatttttcagtagcttctatagcataattataaaatgctccttcgatgtgcagtcttgctgctttggcagcagccagaaagtcgttgggatatttttcctgtatgttttcatagcatcccaatgctgctaaaatatcatctaccccttcaaaactttgagcttgtagatgtaatgcaacagccgagctatctgtttctgtaagtagactgctctctcccaatgcttcatcgaatttccgctgattcagtaatagagtaatgtattgaatacgggcatatttattatccggattcaggtccactgccttttgataatattttaatgcctgtttgttttttaataatgacttacagcactctgctgcttcaatataagctcgtggattcagagaatcttgcatcacgacttcttcatatacctgaagcgcttccctgttgttgccaagacttttcagcgctttccctttctgatagagtaggggaacagtcggcgtctcttgatcaataagcgtcaatgccgtctcataatcatagtttgccattgcttcctgaatggggttggtattttgtgccatcagcaatgaagaggcactggaaaagagtagaataaagagtttccgcatagtctttttatctttaaagtattgcttaattggctgcaagttactaaaaagatttactttacgaaatattcgtagctccttttagatagattaacgaataaaaatagcgccccttcagacgaaggagcgctaaaatataccggatgttttgaatggtaaagataccactcaacgcacatgtcttttacatcaagaatcccagcaagataccggcagctactgctgaaccgattacacctgcaacattcggacccatggcgtgcatcagcaggtagtttgtagaatcatattccagacctactacctgagagatacgtgccgagtcaggtacggcagatacacctgcattaccgatcaacggattgatcttattatctttcttcaggaagaggttgaatatcttcacgaagatcacaccggaagcggtagcaattacgaatgacaatgcacccagaccgaagatcttgatagagtcgagcgtcaggaactcagaagcctgagtagaggcacctactgtcaaacctaacaggatagtaattgtgtcaatcagcggaccacgtgccgtttcagccaaacgacgggttactccactttctttcaacaggttaccgaagaacagcatacccaacaaaggcagaccggacggaacaaggaaacaagtcagcaacaaaccgataatcgggaagattactttctccgtgtgagaaactacgcgcggcggtttcatacggatcagacgttcgtgcttgttggtcaacaggcgcatgataggcggctggattaccggtaccaacgccatgtacgaataggctgataccgcaatcgcacccatcaggttaggggccagcttggatgaaaggaagatagccgtcggaccgtcagcaccaccaatgataccgattgcaccggcttgcataggatcgaaacctatttccaaagcaatcatataagcaccgaagataccaaactgagcagcagcaccgattagtaacaacttaggattggatatcagagacgagaagtccgtcatagcaccaatgcccaagaagatgagcggcggataccaaccggaggttactccctgatataagatgttgagtacagaaccttcctcatagataccaactttcagtccggcttccatgttgaaaggaatattaccgatcagcataccgaatccgataggaatcagcagcatcggttcaaattccttggctaccgccaagtatatgaagaacaaacctaccaggatcataacgacgtggcctaccgttgcattggcaaaacccgtgtacgtccagaagtcggcaaggttgtttcctataaatgtgataaattctcccatattattcaataattacaaggtcattaccttcgagaacggaatctcctttacttacgttgatcgcagtgattttaccgtctttgtcggcattgatattgttctccatcttcatagcttcgaggataatgatggtttgtcctctcttcactgtatcacctacattgactttgatgtcgaggataacacccggcagcggtgatttaacacctgatttgccagtagaaggagcagccggcttcactaccggagtcggagcgggggcgggagttgtaggacgtactaccggtttaacaaccactttcggtgccttttccatttctactttgtaaggggtaccgttcacttcaacgtgagcgatattttcgtcgatatctccaatggtaactttgtatgtattaccgttgattttatatttatattctttcatcgttttatcaatttataggtgattactttttcagaggagtttcacgcaatgtgtaaatcttcgaactccacggtgaatagctgcgttttacacgggtgatggtaagaacggtgtcttccacgtcgtgtacatcgctttgcatctcgtacatagccatggcaatagcagcaaatatttctcccggagcttcgcccagtttcttttctttagcttcctgtttgtcagtaatacctttagccttcattgcattacgcttactgaggcttacagataccctgccaacaatcttgaaagcaatgaaaagcagaatcaaaccgcagaatactacactcatggcagaaatagacataccgataccgtcgctatcatgctcttcgaatttctccatcttagcattgctgtcgatagttttgttgttggtactcggagttacgtatttctctgcactaccgtctttaacttcccatttttcagcggcatcacttatgcgtgcataagattggttagcttgtaatacgcctgccggtatggtaatctgatccagtaaattgcgtcctgaatcatataaaccaatccagttctgtgtttccggattcagcgtaaagttcgtgtggaatgtaccacgtcttgcttctccatcagcccagaataatgaatgctgacgaggtttcaccaaagtcaggacatcacctttagggataaagtagctgacagtatcgcccggctggctgctgcatttcagatagcaacctgcgaggtcggcgctgccgtatgatctgttgaatatttcaatccatgcgctgtgcaagccgtaatcgtcctgataattaccttcgttggtaatcagcacttcattcagcaccagcttattgttcgatttcttctctccgcaggaagagcatacacctaacatcagcagcaaggtaaagaatattccgatttttgttttattcataatcgttcttgtttttagtgttaaaagcctgattacaaaggaatattaccatgcttcttagctggattggacaatttcttagtctgcaactgttgcaaagcgcggataatgcggaaacgtgtgttacgcggttcaatcacatcatcgatgtaaccatacttagctgcattgtaaggattagcaaacagcttggtgtattcagcttctttctctgccaggaattgagcaggattttcctgttccttagcttcacgggcatacaatacctcaacggcacctgcaccacccattacagcgatttcagcagtaggccatgcgtagttcatgtcaccgcggagttgcttacagctcattacgatgtgtgaaccaccgtaagacttacgcaatgttactgttaccttaggtacagtagcctcaccgtaagcatacagcaacttagcgccatgcagaattacaccattgtattcctggcctgttcccggaaggaatcccggaacgtctaccaatgaaacgataggaatattgaaagcatcgcagaaacgaacgaagcggccacccttacgagatgcgttgctatcgagcacacctgccagatacttcggctggttggcaacgatacctacggactgtccgttgaaacgtgcgaaaccgataatgatattctttgagtaatctttctgaacttcgaggaactcaccgttgtcaacaatagcggcaattacttcgtacatatcatacggcttgttcgggctatcggggatgatttcattcagagaatcttccagacggtcgataggatcggtgcaatctacgtaaggagcttcctccaggttgttctgaggaatgtagctcaacagtttacgcaacaaagccaaaccttcttcttcagtcttggcagtgaagtgagttacccctgatttggtagagtgaacacttgcgccacccagattttcctgagttacgtcttcacccgttacagtcttaactaccttcggaccggtaaggaacatataagaagtaccttccatcatcaacgtgaagtcagtcagtgcaggagagtaaacagcaccaccggcacaaggaccgaagatacctgaaatctgcgggataacacctgatgccaggatattgcgctggaagatttcagcataacctgccaaagcgttgattccttcctggatacgtgcaccacccgagtcgttgataccgatacaaggagcacccattttcatagcctgatccataatcttacagatcttcagagacatcgtttcagacaaagaaccggcagaaactgtaaagtcctgtgcgaacagataaaccaaacgaccgtcgatagtaccacaaccggtcacaacaccatcaccgggatagtgtttcttttccataccgaagttggtacatctgtgctctacaaacatatccatttcttcgaaactaccttcgtcgagaagcatggctatgcgctcacgagctgtatacttacctttctcatgctgtttggcaatcgctttttcaccaccacccagacgtgcagctgcgcggcgatcgataagctctttaatcttttcaagttgattactcattttattaaatataatgggttaatactgtttttaattataaattatgaattacaaattatgaattgcagattacaaaattacccgtgaacggagtaatttgtcatttgtaattcgtcattatcttacggtttttcgcaaagttccgtcaatacgcccagtgttgatttcgggtgtaaaaaagcaatgttcagaccttcagcacctttgcgcggagccttgtcgattaagcgaacgcctgcagcttctacttcagctaatgcgtttgctacaccatcctcgatagcaaatgccacgtgatgaacgcctgcacctttgttttcgatgaacttagcaatagtactttcgggagaggtcggttcgagaagttcgattttagtatcaccaactttcaggaaagcggttttaactttctggtcttctacagtttcgatgttgtagcacttcagacctaatacgttctcgtaatacggcagggcttcttcaatgctcttaacagcaatgcccagatgctcaatgtgtgaaatcttcataactatatttattaatgttggtataatgtcttaatcaaaggcataaaacagcacaaagaaagagatttcttccttaatagagaaatttttcgtcaattaattattggatatttgaagtttagaaaggtttttttagacttctgttcagaagtcgagcaacaggcggacgttaatctgacgagatgtcaggtaattgggtactgcaaactgattatttcgggtgtctgttacccaataataggagttgacgttgctgatatttagcaaattgaaaatatccacccccaaccaaaggctgcggatgccgcgctgattttcgcgttcactgcggtcgataatacagcgggacatacctatatccacacgtcggtaaggggatgtacggaacacggcagcctcgcgtccgctatgtggagggccgaagggaagacctccggcaagtgtacctttcaggttcattttccacttgcggctaccgggaaaataatccgtaaaatagagcgaaagacggtagcgctgatcggtgggacgggggagccattgtccgtttattttctcttcggttttcatcagggagaagctcagccaagagtctgttccgggaacaaattcaccgaacagtttcatgtcgataccggtggcgtaacctttggaaaggttgcgtccgtaataactaatccgtacattatctatattataagggatgagattgctcaatgctttgtaatacacttccatggagaagcggaacgggcggtccatggcacggaaattatagtcgccacctgccacgaagtgcagggagcgttgcgaacggatgtcacggttcagagatacggtagctatcccgtccacctgggtggtatcccggaattctttatagaatggtgcctgataatagactccggcagctactctcagggtgaatttctcattgaatgccggaatcagagccagggaggcacgcgggctgaaaatgaattctttgttccagtcccagtaactgcctcgtatgccggcagtcagggtgaatagtccggcagtagagcggaatcggtatgtatcttgcaggtaaaatccatatcgtttgctgtccgtctcgttgcgcgaacggagggtgtagaagagttccggtccttcggaagtttgtggcatggagtatccggcagagtcacgcatttcccattcgcgcatccggtctttgatgtgctcccgtttgaactccgcaccccattgcagggagtggcttttcagtcggtggcggcctgtgatggaataactttgcacttctgcggtaaggtaattgcgagcatgttccatgtaagttcccacgccgatggtttcggaagtttcctcttcgttggtagtgccgtctacttgcgttccgttgtccagggagttcagccagtattgcccggtgatgtcgtacgtttcctgttctttcgtgtggaaggcggaggcttgcagggtcagactgttttgttcattcagccggtaggtggcgtaggcggttccgaacagggtgcggaataaatctttctcctgtccttcaaaatagactttaaactcacgtacattgctgagagtgccgaagcgggtgtagcggtcttccggctggaagttatagcggttttctgaaatattgccgatgacacctacttcccaacgcttcgaaggtgtccagttcagataagtctgatagtcgatataacgcgggtcgtattctccttttgtatccagcgtgccgagcagatattggttggttttataacggatgccgtttgtccaggttagcttcttggtggcaattcctacgtatgccgaggctcccaacaggctgacggaggcacttccttccaaccgttcgggtttcttgtaagtgatgtccagcacggatgacatcttatccccgtacttggcctcatagcctcccgtggagaagccgacggattgcaccatatcgggattgatgaaactcaatccttcctgttgcccggaacggatcagcaagggacggtatatttcaatgccgttgacgtacaccatgttctcgtcgaaactaccgccgcgtacgttatattgcgagctgagttcattgttgctacttactccggcctgcgtggctatcacggcttctatgcttccgcccgaagcgtcgggggccaggcggttttgcttggtttctatctgttggatggttccggtttgccggcgacgctctgttacgctcacttcacccagttcaaagttcatcgggggcaaggttatgttcagactgatatttccttgcggacgtactaattttcgtttgcgggtttggtatcccagcatggagaagatgaccgttacgctgtcccggctttcgaatttcagtgaatatctccctttcaggttgctgactgtgcctatagccgtcccttccaatcgtattgttgccaattcaatcggattaccattttcatccgtaaccgttccgcctatcttgactgttttttgggcaagggcgggagtggagaatagtattataagagctgtcagtaaccaaaaatgtctcatactttttctataacggagaaacttcccgaaacgtatatcaggaggtaaaaaagagcttttaactttgcttctttattttttataggttcgtgtcacatatgttacaactccaatccgtgtttcgtgctacctttgcagaaaaaatagattatggaacaattacatgctcatgaagtccttcatatgatggaaggcaacagttattcggaatcatcattaaaagaggcaatcatccagaaattcggtgagcatcaacatttttatacttgctcggcagaagatatggatgcggataaattgatagagtttctgaaagcgaaaggtaagtttatgcctgctgatgatggatttacggtggatataacgaaggtttgcagccattgatgctgatgcatccgtcttctccgtatcaagtccataccaagtccgtgtcaagtccaagtaaaggtacttttatacggaccagatacggacttggtacggacttgacagggttaagatagggctttgggactgaaaaatgaagcagaagaatctgctcttcaagatgaatttctctaaatggatgtgcggagcaaaaaaaaatctgaatacatatttgcaataaaacaatttgtacctttgtagccgaatgcaatattgaaactatgggaattgtaataggaatagacgttggcggaagtactacaaaaattgtaggaatcaacggagaagagatacagtcaccgatgtttatcactgcgactgatccggttacttctttgttcggggctttcgggaagtatatttatgataatggtattcagctttcggatatagagcaagtgatgctgacaggtgtgggtagtgcatttgtagatagtccgttgtatggtttacccacggataaggtcgatgagtttatagccaatgggttgggtgcacgtcatgccacggatattgaccagctgatcgtggtaagcatgggaacgggcacttctttcgtaagaatcaacggagaaaagatagagcatattggtggtatggcaattggcggaggtactttgcagggattttcccgcttgttgctgaagacgcatgatttcaggcagattgcagcaattgccgagaaaggcgacattacccgtgtaaacttgcagattggagatatttgcaatcgtcctttgccggatcttccggtgcatgccactgcttcgctgttcggaaaagcggatagtaacgcttcgcaggaagatattgcaaaagggattatttatatggtgctgcaaacgataggtggtgcagctgtgttgtctgcgctgaatggtcctatcaaagatttcgtcttgattggtaatcttactaaatttccgcagtgccaggaggtttttccgaatatggaaaagatatatggggtgcgcttccatattccaccctatgcggagtataggacggcgataggggcggcactggcatatttatctaagcattagcagccacttccatacagggatcacttctattcttgaatgattatccatttgcagcacactttcctcatcgaaagtgataacgagaaaccgtttgcaaggcaataccttggacagttttattaatgcatccgtttcccgttccctggtttccaagtcttttatactatatgatacctgtatggcccattctttttccggaatatagaaatcgacttctatccctttattataaaagaatacggcatcttctttcccgaattggcgaatcaggctgattgctaccagattttcaagcaaagatgtatttccgtctatcaggaataaattgagtattccgttatctgtgaaataatatttgctgttgctttctttctcagccagtttagcggcaatattattgatgcgttgaagaagccaggccgactctgcatattcaacgtattttatggcagaagttgtgctgagtttgctgcccgtagtggatactatattggctatacggttgaaagatataggttgttttatgctttccgccagttttttaatcataatcttcagcccgaaagtgttcgttatggcatttctggcagcgatatctcctaaatatatcttttgatatacgctggtgagatagttcctttttgctgcaagaagtgcaccttcggggaaaccgccattatggaagtagtcaataaaacggttcattacggcagctctggattctgtacccaatagggacagctcgtcataagccgtgcggtggacttccaaaaattccgggaaactgtaaggatatacattgattgtaatatacctgcctcctaatgtcgtttgtatgtcactgctaagcattttggcattgcttccggtgatgtataccttatatttttcatccgctaagcgtcgggcaaacttttcccagccttctatattttgtatttcgtcgaggaaaagtataggcctctttccatacatttcgaggtgagcttcaatgatgaggttgagctcggaaacttgcaatccgtctaagcgttcatcttcgaagttgatatatagcatactgtcccatccaacgccttcagtgagtaattgctggatgcgttgatagatcaagaaagattttccggcgcgcctgatgcctataagtacataattaccgaaatcttcaaaatgaaagtctctcttgaagacctcgtaacgctgaacctctttctgattgtccagcatgactgattttaatagttgcttatccatactgtttaatctgctggataaaaagcaaggtggtttatccaatctgttggatgaaacggtggtgtttttatccaatcgtttggacaaagatacttaaaatccttttaggaagcaataaagcagtctaaagtttatgcttatgtttcagaaaaatacggtgaaaagcttgacttcggcttttgtatgtagtatatttgtatccgtaatcttaactcatattcaattttaaattagcataagaggaggagcattgcttctcctcatttctgtatcctccctttttatgcttcctgaatgccacactccaatactcccgatgccacacctcagtttcccgaatgccacacctcggcaggtgaaatgccacaggtttcacccgctaacatgtggcatttggaggattaaagtgtggcatttgtcttgttaacatgtggcaaatgcatcgtctgtttgtggcaagcgcatcatctgttccgtaagtgtgccagcaatgcagtcggctatctaaattcgcttagaggagttaataatatgtaaatctgctcttgacaacaattcggttttcaagttcgcaacggttcctcttccaacagccatttccaaacaggaatcacatgaatagagacaccgctttcgtgagtaataatccgttcttcatcccgtgtgataatacacatattatccattggaaaaacacggtttagcttgatgaggccttccacttctcgccgacaggttgtttcatccatcagagagtagctgacctgaatagccgtttttgcttccggtatgatgaaatccacttctatgttttggttgtagaagtggagctgggcaccgtatctcttatataaatgaatagcgacgatgttttctaaaagagaagtattgccatcaagcaaaaagatacttagtaagccattgtctataaaataatgcttcatgtttgaattgcgctcggcaaatttggcggcatagttctctatagggaatatgaggcaggattcttttaaataacggatgaactcgatgacggttgctttgcttatttttatgccaatagaactgattaagttagccaatcgtgtatatgaaacaggttgcttgacattctcggccaaccttcgcaccagtaatcccaaagcttcttcgtttcgaactttgtttcgcacaattaaatcgctgaagaatattttactgtaaatgtcattcagccagactcttttagctatgacatcggttaattcaggaaagcccccatacaggaagtagtcattgaaggccttgcttacttcggcagcttgtttgccatacatccagttcttggataaaatgatattccgggcattcagatattcagcaaaggaataaggatagacatctttattccagaaacgtccccccaatgtagtggcaatttcccggctcagcattttggcattgctaccggtgatgtaaatgttatacttctggtttgccaggcgtcgggcaaagtgttcccaaccttcgatattctgtatctcatcaaagaaaagtaaaggacgcaaatcaaacagactatgatatgcttgcaggattaggtctaaatcatccgctgtcatttgtcggaggcgctcatcgtcaaaattgatataaacaatttcattgatgttatgctcttcgcgtagtagttgctggatgcgctgataaagtaaataggattttccggcttgtcggatgcctacgaatacatagttccctttctgctcaaaaaagaacggacgttctgtcagagaaatttcattcacgaactcctgaccctctatgatgattctgcggattacttctctttctaccataagaacatgaattatgtaagaattgatggcaaatataatacttttgttttgtatacagaacgaattttatacttttttgtttcctatacaaaacaccttagactacactaccgattgttctataccgttcggatgtaaaaatacctagaaatttcggatggaactttttgctcttcaagaaaatactcctatctttgcgcccgaatttatgagctaatataatgtctcactcaattaattattaaacaacttattttatttaatggaaaacttaaaaaatgtagcgcctgttgaagacttcaactgggatgcttatgaaaatggcgaaaccttcggtggtgccagccacgaagagttggaaaaggcttacgacagtacgcttaacaaagttaacgaccgtgaggtagttgacggaactgtaatcgcgatgaacaaacgtgaagttgttgtgaacatcggttacaaatcagacggtatcattcctttgaatgaattccgctacaatcctgacttgaagatcggtgatactgtagaagtatacattgaaaatcaggaagacaaaaaaggacagttggttctgtctcaccgtaaagctcgcgctactcgctcttgggatcgtgtgaacgctgctttggaaaacgaagaaattatcaagggttacatcaagtgccgcacaaagggtggtatgatcgtagacgtattcggtatcgaagctttcttgccgggttctcagatcgacgtgaaacctatccgcgactacgatgtattcgttggcaaaactatggaattcaaggttgttaagatcaaccaggaattcaagaacgtggttgtttctcacaaggctcttatcgaagctgaactggaacaacagaagaaagaaattatcggtaagctcgaaaaaggacaagttcttgagggtaccgttaagaatatcacatcttatggtgtattcatcgacctgggtggcgtagacggcttgattcacatcactgacctgtcttggggccgcgtaagcgatccgaaggaagtggttgaactcgaccagaaactcaacgttgttatccttgatttcgacgatgagaagaagcgtatcgctctcggtctgaagcaactcactccgcatccttgggatgctcttagcgctgaactgaaagtgggtgacaaggtgaagggtaaagtagtggttatggctgactacggtgcattcatcgaaatcgctccgggcgttgaaggtttgatccacgtatctgaaatgtcttggtcacaacacttgcgttctgcacaagacttcatgaaggtaggtgacgaagtggaagcagtagttctgactctggaccgcgaagaacgtaagatgtctttgggtatcaaacaactgaagcaagatccttgggaaactatcgaagagaagtaccctgtaggttctaagcacactgctaaagttcgtaacttcactaacttcggtgtattcgttgaaatcgaagaaggtgttgacggcttgatccacatctctgacctgtcttggactaagaaggttaaacatccttctgaattcactcagatcggtgcggacatcgaagttcaggtactggaaattgacaaagaaaaccgtcgcttgagccttggccacaagcaactcgaagaaaacccctgggatgtattcgaaacagtattcactgtaggttctgtacacgaaggtactatcatcgaaatgctggataagggtgctgttgttgctctgccttatggcgtagaaggtttcgctactccgaaacacctcgttaaggaagatggctctcaggctcagatggatgagaaactgtcattcaaggttattgagttcaacaaagatgctaagcgtatcatcctttctcacagccgtatcttcgaagatgctgcaaaggcagaagaaagagctgaaaagaaggctgctggtaagaagccggctggcaataagagagaagacgctccggctattcaaaaccaggccgcttctactactctgggcgacatcgacgctctggctgctttgaaagagcaaatggaagctggaaagaagtaatcacttctatagatagataaagatgagagggcacttacttgaaagtgtcctctcttttttttatatttgggtagaatcttggggaataaagtgtgcttttttattttatgattatctttgcagaatagtggttgaatgtggtggctctgaatctaccgcattctgaatggtataaataatttaatgtagatttactatgcgaaacattattaagaatttgggaagcattatgttgctgatctgtttgtctctcatcttgctgaccggatgcagtcggaagtctcaactgaaattagcaatagaaatggctaataagcagtgtcctatgagtataggaacgacaggcgaaatatcgagtattacttttgatggaacggatgtgatatacagtctgttgatgaatgaagactatctggacttggatgccttggggaagaataccgatgcaatgaagtctgctgtaatggttatgttcaagaatccgaaaggggaaataaagtcgatgctggaaatggtagtggatactaaatccggtattagattaatatataaaggaaagtctaccggcaaagaagtggaatgtagactggacactgaagagttgaaacgcatcttgaatcagaagggaacggaaaaagagagtgagcggcagaagttggaagaactggtgaatgttaccaatgtgtcatgtccgatgacgatagatgaggctaccattcttaataagttaacgatagaggcggataaagtagtatacaattatacgattgatgaagaaaaagtagcaatggctgctttaaagagtaatgaggagcagatgaaacagaatataaagggggctttgaatgtatccgaaccttccttaaaaatgttcctggaagcatgtgtgaaggataataaagggatagcatacagatatgtaggcgatacctctggtgaaaatatagaatacctttttactgttgctgaactaaaagagcttctgtccaaataaataaggattgttcagaatgtattgctaatggaaaagtttgaattacatatactgggctgcggttctgcgctgcctactacccgtcattttgccacttcgcaagtggtgaatgtgcgtgacaaactttatatgatagactgcggagaaggatcgcaattgcaattccgcaagtcccgactgaagttttcccgcttgaatcatatttttatttctcatctgcatggagatcattgctttggtttgttgggattgatatccacgctcaatctgctggggcgtacggctgagttgcatattcattcaccgaaaggattggaaaccctattggttccgatgctaagtttcttttgccggcaaatgacgtataaggttcttttccatgagtttgagacgaaagaacccggaatgatctatgaagaccgttctctgacagtgactaccattccattgcgtcatcgtatgccttgttgcggttttctgtttgcagagaagcagcggcctaatcatatcattcgggagatggtcgacttttatgaagtgccggtatacgagttgaataggataaagaatggagaagactatgtgactccggaaggtaaaatcatttccaattccttactgacacgtccgtctgatctaccgcgtagttatgcctattgttcggataccatctatatgcctgagattgcggaacagataaaaggagtagatttgctattccatgaggccacttttgcaaatgcagacttgcctcgtgccaaagaaacttttcatactactgctgctcaggcgggagagatagccaaggcggcaggagtgaagaaattggtgatcgggcatttttctgcccgctatgaagatgagaatgttttgcttaaagaagcttcggctattttccccgagacggtgctggctaaggaaacgctgtgtttggaggtataaatgataatcactaacaaattatcatttaaccgtctgttttttgttttatcgaatcgaatgccgtatatttgtacggaataatctgaaaacataggcttatagatgagaaagttactctactgttttttctttttgttgactttttcgtcgcagtccgtggcatgggcgcaggacggtcggaagcaggaaacggctcagaaagagcagccgtcttctactattgtgctgactgtttcggcagaaaaccgggtacgtgtgcagaatgcagaacccggctcccagatggaagtctacaatattgtaggcgtgaaacttaccacgatacgcattgactctacggatgtcaccgttcaggtgaatttgcctaaaggttattacatctttaagattgggaatgtcgtgcggaaagtggtaatcaaataaacgaaacggaatagatacttatgaatccttcctataatgaacgcgaagtgctggagcttctacaagatgaaagtacacaaaagcgagggtttgagttgattgttgcgcaatatagcgaacaattatactggcagatccgtcgtatggtgcttttgcatgaagatgccaatgacttacttcagaacacgttcattaaggcatggaccaatatcgattatttccgtggagatgcgaagctttctacctggctttatcgcattgctttgaatgaatgtttgactttcctaaataaacaacgcgctgtaactactgtttctattgatgatgaagatgcttctgtacttcagaagctggaaagcgatccctatttctccggcgaccgggcacagaagtctctacagaaagcattgcttacactgccggaaaagcaacgtatggtattcaacttaaagtattaccaggaaatgaaatacgaggagatgtccgacatcttcggcacatctgtcggtgctctgaaagcctcttatcatcatgccgtgaaaaaaatcgagaagtttttggagggagaggtttaaacctttaccccaaaacgtagtctaacctaacagagaggaaaaaagcttatgaaagaagaagataacatattgaagaaggtagggaaggaaaatgctttccgtgttcctgacggatactttgagaatcttacttcagaggtgatgagccggcttcccgaaaaggaaacacctgcaattattaagagagagcctacgaagtgggagagaattaagccatgggtatatatgactgccatgtttgtcggcgcagcattgattatccgcgttgcttctactgaccgtacacctgttaacaaccggatggcgatggacgaacctgaaaccgaagttgtttctgatgaatatatcagtactgtgctggataattccatgctggatgattattcgctgtatgtctatctcacagacgtcggtgcagagtgatgtgagtaacaacttaactgtatgagaagaaaatgaaaaagctgattgttttgtttattgtgatgtgcagtttcatccccttgtcatgggctatggacggatgtaatcaacatttgtctcctgatgaattccgtgccaagcagaaagcgtatatcacagagaaagccggattgactaaggaagaagccgctaaattctttcctgtttattttgaattacaggatcgcaaaaagcaactgaatgatgaggcatggaacttacttcgaaaaggaagggatgaaaagacgaccgaagcgcaatataatgagattttagaaggcgtatacgatgcccgtattgctaccaaccgtctggagaaaacttactatgagaagtttaagaagatactttcgaacaaaaagatatatttagtacagcgtgctgaaatgcgttttaaccgtgagttgctgaaggggatgcatcataaaggtggagaacctcaaaaaccgcaaggaaagaaaaaataacagaatattaggagcttcggctccttttttcgtttatagccgatacttgcggctgcgaagaaggtgtgtcataatgcaatactatctcaattcccgggaggaggggagcttaagttactttccagttttgacacaccttcttcacttgtataagtgatggccttcgcagccgcaagtgtgaatcttcgcagtcctatgcatttgagtttttatttttccagctttttagcttcgttccagatggcgtccatctcctccagagtcatatcatgcaggtttttgccttccttgatggtgtgcgcttccagataattaaagcggttgataaacttctggttggtgcgttctaatgcattatccggattgatcttgtagaggcgtgcggcattgatgaggctgaatagtacatccccgaattcggcttctgccttgtccttatccatattggccacttctgcctgaaactcctggatttcttcttttaccttatcccacacttgttctcgttcttcccagtcaaagccgacgttgcgggctttgtcctgaatacggtaagctttgatgagtgaaggaagggcggcaggaacaccactcaacacactcttgtttccacctttctctcttaacttcagttgttcccagttttcggaaacttgtccggcagtatcggcttttacgtcaccgaacacatggggatggcggaagattaatttctcgcaaaggtggtcgcatacatctttcatgtcaaaatcgcctttctcggaacctatctttgcgtagaaagctacgtgtagcaagacgtctcccagctctttgcagatatcatttttatcgtcacgtatcagggcgtcacaaagttcataagtttcttcaatggtgttgggacgcagactttcgttagtctgcttgcggtcccagggacatttctcgcggagttcgtcgagtatgtccaggaagcgtccgaaggcttccatctgttcttttcttgtatgtaacatatctttatagggttatttattgcaatgtgtataataggatataagcaaaccgactacttcggagtagttcttgcggccactttgtatcttgtttcctttcaggtacaggtcgtatatccagtcttgtatatctccgatgagcggactgtatttctccgtccagtattcctgattacttttagccagttcaatgatttcagggcgtatccgcttgaagagctctttgtattcttcttcatccatcagtcggcgggcattgacaagtacatgtcccagcactgaaaagtatccgcagaaacggatacctcgcgcttgcgaacgtgtacagacctgataagcatagaagttagcttccgcctcgctggagatgcccaataaatgtgccagttcatgcgcatacgtggcaggatactgtgcagggagcagatctccattcaaggtaaattcgcagaagaaaggtcccatgctaccggtgacgcccaccatggaaatcagcggagtgaaaagcattgtcttcacccgtggtgacttatggaaaggatgatgtacacccagcgtatcactgatctgattgtatccgcgaactgtttcccggcggataaggtccttattgatggtggttacatctacatacgatccattcagtttgtcaacgtaatcatcaacaaagttccggaagttttcgggagtgtatgcggtataaggaatctttgtccgttggtagaaattgggctgtgaataattaagtccccaagccagatagaaccagacgtatatccataacagatattcaatatcattcagcaagatgcgtttccactttttcttctgaaagcggcgggcataggcagggtagagaagtacgcccgcaatgctgagggctatgaataagtcgcctatggcaaagggaatgaggcgggagaaagacgaaagaatataagctatgacaggatatacgctgtgtgcatatatttttcccatagccggaatgagctgtgtggcccagactactaacaagagtgtgcatagcacgatataacgaatcttcagcttatatttcatcgcaaatttatttgaaaggcaaaaatatacatttattaaatgtcacgtaggaaattagctttatatttgcaaaaaaactattaataagcaacttaagtaacgacattagacactgtaattatgactgatcaaaatgacattgaacgctattgccgtaattgcgtttcacgcgatttcgtgaatggcagaggactggtttgcaagcgtaccggggctattcctgcatttgtaggtgaatgtgaaagctatcagaaagatgaagagctggagaaaatggctcccactcctaagcctgaagattattcgggatatgtagacagggagaaactgttggctgaggagaatttaccgaaagctgtattgttcggagtgctggcatgcattgcaggtgctgtggcttgggctttgatctctatttctaccggataccagatgggatatatggccattggtgttggtttcctggtaggatttgcgatgcgccaggggaaaggaatacgcccaatattcggcattattggtgctgctttggcgttgataagctgtgtgatgggagatttcttctctatcgtaggtctggtggccaaagaatatgaagtctcttttatggacgttcttttcgacgccagttatggtgaagtgatgtctgtggtaatagaaaatatggcttccatgacaatcgtattttatggaattgctctttatgaaggttataaattgtcgttctctgcacagaaagcgccggagggtggcaagatttgaatttaatttagtaattttgcgcccgttattcgcgataaaataaattatatacagatttaaaagatatggaattagcaagtaagtacaaccctgctgacgtagagggaaagtggtaccagtattggttggaccacaaattattcagttcaaaacccgatggtcgtgagccttacaccatcgtcattccgccccctaacgtcaccggcgtgctccacatgggacacatgcttaataataccattcaagatattctggtacgccgtgcccgtatggaaggcaaaaatgcctgctgggtaccgggtactgaccacgcttctatcgctacggaagcgaaggtagtaaataagctggctgcacaaggtatcaagaagacagatcttacccgtgacgaattcctgaagcatgcttgggagtggacagatgaacatggtggtatcatcctgaagcagctgcgtaaactcggtgcttcctgtgattgggaccgcaccgctttcactatggacgaaaagcgtagcgaaagtgttttgaaagtatttgtagacctctacaataagggactgatttaccgtggtgtacgtatggtaaactgggatccgaaggctttgactgccctttctgatgaagaagttatctacaaggaagagcatggcaaactgtattatctgcgctataaagtggaaggtgatgcggaaggacgctatgctgtggtagctactacccgtcctgaaacgatcatgggtgataccgctatgtgtatcaatccgaacgacccgaagaatgaatggctgaaaggtaagaaagtaatcgttcctttggtaaatcgtgtgattccggtaatcgaagatgattatgtagatattgagttcggtacaggttgcctgaaagtaacccctgcgcatgatgtgaacgactatatgctgggtgaaaagtataacttgccaagcatcgatatcttcaacgataatggtacgttgagcgaggctgccggtctttatatcggtatggatcgctttgatgttcgtaaacagattgagaaagacctggatgctgccggcctgttggataaggtggaagcctataccaataaggtaggttattccgagcgtaccaacgtggttatagagccgaagctttctatgcagtggttcctcaagatgcagcattttgcagatatggcattgcctcctgtaatgaatgacgatctgaaattctatcctgccaagtataagaatacctatcgctactggatggagaacatcaaggactggtgtatcagccgtcagttgtggtggggacatcgcattccggcatacttccttccggaaggtggatatgtggtagctgctactgaagaagaagctctgaaactggcaaaagagaaaaccggtaatccggccctgactatggaagaccttcgtcaggatgaagactgtctggatacttggttctcttcctggttgtggcccatctctttgtttgatggtatcaacaatccgggtaatgaggaaatcgattattactatccgacaagtgacctggtaaccggtccggatatcattttcttctgggtagcccgcatgattatggcaggttatgaatatgaaggaaagatgccgttcaagaatgtgtactttacgggtatcgttcgcgataagttgggacgtaagatgtccaagtccctcggtaattctcccgacccgttggaactgattgagaagtttggtgccgatggtgtgcgtatgggtatgatgcttgcagctcctgccggaaatgatatcttgttcgatgacgctctttgcgaacagggacgtaacttctgtaacaagatatggaatgcttaccgcttggtaagtggctggacaattgatgataaccagcctattcccgaagcggctaagctggcgatatcctggtttgaatccaaacagaatgaagttacagccgaggtagcggatttattcagtaaatatcgcctgagtgaagctcttatggctgtctataaattgttctgggatgaattctcttcttggttccttgaaatcattaagccggcttacggacaaggcattcatagtacggttcgtaatgctgcgatttgctattttgataatttgcttcgtctgcttcatccgttcatgccattcattaccgaagagctctggcaacagatgtatgagcgtgaggagggtgagagcatcatggtatgtcctttgagtatggatactcatgtagacagcgagatgattcagcaattcgaagtggtgaaggaagttatcagtaacgttcgttccattcgtttgcagaaaaacatagctcagaaggaaacactggaattgcaggtggttggtgagaatccggttgatgcattcaacttggttatcatgaagatgtgtaatctctcggcaattgatgtggtagatactaaaaccgaaggtgctgcttcattcatggtaggaactacggaatatgccgtacctctggggaatatgattgatgtagaagctgaaatagcccgtatggaagcagaattgaagcacaaagaaggtttcctgcaaggcgtcatgaagaagctgagcaatgagaagtttgtgaataatgctcctgccgctgtccttgaactggaacgtaagaaacaggcggatgcggaaagtattatcaactctctgaaagagagcattgctgcgctgaagaaatgatttatttaagtaggtgagcataattagtttatatgatggtaaatgataatttagcggcgagggaatgggtacgcggactacgcggataaggcggacgaatgcggattaaaatttccctgcggcgtgcaagtaatttttcagacgcggatgacgcggatgacacggatctctttttttccatccggataagatgcagtaaacatagcgcagcctttaaaatccgcgttatccgtgtcatccgtgtctgaaagattacttgcacgccgaaggagaaccttgctccagcgctacgctgctaaattatcatttatagaacaagttaattttgcatgagtacttatccctaattacttatccctaaaaaatagcccttgcaatatccgattactgcaagggctaatttattttttataaatcaatgctattacttttccagcagttctttcagaaaagaatccaactcttcatccagacctttcagcaattcttcgttcacaagcaacgtatcatcatccatcagcagtaactctgcaattgtctccttttcatcatccactaatacgaaagagtaaggtttcagaatagtcagtttttcaaagtcacctccgttcttcatgttgtggagtaaggtagaaagaatacgttctacattttcgtagaaatcatctccgtcataagtcatccattcctcgatagagacacaagccagatattcgtcttcgtcatcaaagatggacaattcgccggaattctggttggcttgcagatggatgtcggtcacaatggtttgctcacagccacaagtgtatttggcgactgcctgtttaatggccttttcaaggagtgataatgatgcttggctcagtttcataatagatattctttcttaatggacgttcaaaggtataaaaaaaataattacctctgcatcatttctctaaaaatcatttttaaatctttccatttgggcgttcagtcgggtcattccctcctttcgctcctgcaattcgttcaggtagcgggttattgcgaagtaattggggatatccatgaggtctacgccttcctgagttttcttctcgtctattttgtctacatcgtatgctactttctgcgctttcaaggcccattcttctgctgtatgaatgctgtcctgcatttcgtatcctaaggcaatgttataggcggcatacattttctgctttccttttttctttttctcataggtttgcttccagagttcaatggccttgtcccagttatcttcgcggacaaagaccgcggcatcacgcatgtttacggaaccgcctgtaaagagatagcgggaagctgttttccaatgtggcagcatatggctcacggggatagtgccggcaaattcggaagcctctctcagcatctctttttcactgatgagtcctgcgcctgcctgtgccatactgggagctgcatgatcccagaagatgctgtcgctggcattgactgtcaccatcggaccgttgcgttggggcagatacacctttacggtaggatatactttcaggtcaagcgtacctgcatatactccccattccggtaaatattcgattttacggatggagcgcatctgtacgttctccaaggctatcaggaagtccgcatccagactttgggtgagcttttccacttcctctttgctaagggtgctttcgcgcggaatcatatcatgggcacgcaaggcagagtcgcaaataatcacttcatcgaaataattctcgttggcaagtgcctccgccagtgattccgtggctattttgccatccccattgaaatactttgtcttgcgtgctatttctgtctcatcttttttcttctcatcgttttcctccagaatcagcttgttatccgggataggaggcatattatttaccacagctacgcgcctgagggcggacggaaagctgacttccgccggcaacatatagtcgatggagagttgctctatgctttggcaaccgctgaacagcagaacacagcacaccaatagtgagtacgaatatttagtcataagcttattctttatctaggaataacaaaaatacacttttgtatggatatagaaaagcctccaacagtttttaaccgttgaaggcttttattagtgattagtgattagcgataagtggttagcatactaatcactaattacttatcactaaccacttattacatatttttcccgtggcaattcttgtacttcttgccacttccgcaaggacaaggatcattacgtcctaccgtcttttccgcacgaatcggttcacgcttcacttgttcgcgtgtgtcctgttgggcggcggcctgttggttcggatcgttcagatcttgtttctgttcgcggtatttgctcatatcctgcttctgttcgggagcggcctgctgaatttcctgcggttcctgtaccgggatttgtccgcgcatcaggatagaaacagtctggttattgatcttatccaccattgtatcgaacaggtttacagactccagcttataaatcaataacgggtctttctgttcgtagcttgcgttctgtacagagtgcttcagttcatccagttcacggaggttctctttccatgcttcgtcgataacgtgcagcaggatagacttttcaaacgcttttaccacttccttacattcgctgtcgtaagcggctttcaggctgcaagagatgttgtacatgcgtttaccgtccgtgatggggatcaggatattctcgtacatgtgtccctgggtttcgtatacctgcttgattaccggataagcaacctgtgccatgcggtccgtcttgcgcttgaactgttccattgccacattgaaggctgcttcagcaagcttttccttcttttcgttacggaactgttcttcgttgaaaggcacttccatggcaagagtctgcaagaagtccattttgcagttttcgtaatcgggagcttcaacggctgcggcaacacggtcccagatcatatttacgatatccattccgatacgttcacccatcagggcgtggcgacgtttagtatagaccaccgtacgttgcttattcatcacgtcatcgtattccagcaaacgcttacggataccgaagttgttttcttccaccttcttctgtgcacgctcaatggagttggagatcatcttgtgttcaatcatttcaccttccttgaagccgagacggtccattacaccggcgatgcggtcggaagagaacagacgcatcaggtcgtcttccagtgatacgaagaatacggaagaacccgggtcaccctgacgtccggcacgtccgcgcaactggcggtctacacgacgggattcatggcgttcggtaccgatgatggccaaaccgcccgcagcttttacttccgggctcagcttgatgtccgtaccacgaccggccatgttggtagcgatggtcactgttcctttcaaaccggctttggctacgatgtctgcttccttctggtgcaacttggcattcaatacgctgtgctcgatcttgcgcatggtcaacatcttgctcagcatttcggagatttctacggatgtggtacccaccaggacagggcgtccggcttgtaccagctgttcgatttcttcgatgactgctttatatttctcgcgtttcgtcttgtaaacgcggtcgttcatgtctttacgggcgatggggcggttggtggggatcaccactacatccagtttgtagatgtcccaaagttcgcctgcttccgtttcggcagtaccggtcatacccgagagtttgtggtacatacggaagtaattctgcaacgtaatggtggcgaatgtctgtgtggcggcttccacttttacgttttccttggcttcgatggcctggtgcagaccgtcggaatagcggcggccttccatgatacggcctgtctgctcgtccacaatcttcacttgaccgtcgatcacaacgtattcgtcatctttctcgaacatggtgtaagccttcagcaactggttgatggtgtgtacacgttcggacttgatggcatagttggtcattagttcatctttcttggccagacgttgttcgtctgtcaggtcagtctcgttttccagttcggaaagctgtgcggcgatgtcgggcaatacgaagagggtaggatcttccgagttaccggtgatcaggtccacacctttatctgtcaggtctacactgttcagcttttcttcgatgacgaagtacaacgggtcggtagcttcgtgcatacgcttgttgttctgctccatgtagatctcttcggtcttcagcatacctgccttgataccttgctcactcagatatttaatcaatgccttgttcttgggcagtgccttgtggctgcggaacaaagcaaggaaaccttcttcctgatctttcttgtcgctggaagcaatcaggcgcttggcatcggcaagatactgggtagccagtttcttctgtgcttccaccagacgttctacgagcggacgcaattgctcgaacaactggtcctcacctttggggacgggaccggaaataatcaacggagtacgggcatcgtcaatcaatacggagtccacctcatcgacgatggcatagttgtgctggcgttgtacgaggtctttggggctgatggccatattatcacgcaagtagtcgaaaccgaattcgttgttcgtaccgaaggtgatgtctgccagataagcctgacggcgtgcgtcggagttgggctgatgtctgtcgatgcagtccacgcttaaaccgtggaacatatagagcgggcccatccattcggagtcacgtttggccagatagtcgtttacggttaccacatgtacaccgtttccggtcagtgcgttgaggaatacggggagggtagccaccaatgtcttaccttcacccgttgccatttcggcaatcttacctttatgcaatacgacgccaccgaacaactgtacatcgtagtgtaccatgttccagacaatttccgtaccgccggcttgccagtggttttgccagatggctttgtcgccttcaatgcgtacgaagtccttcgtggcagccaggtgacggtcgaattcggtagccgtcactacgatttcctcattttcggataagcgtttggcagtttctttcacgatagagaaagctaccggcagtacttcttcaagagctttttcgtaagtttccagtatatccttttctatcttatctatctgtgcgaaaacttcttcacggttttccagttcgatttcttcgataccagctttgagttcttccaccttggcgcgttggtcggcggcagaattgcggatatattctttcagttcttctgtcttggcgcgtaaggcgtcgttatcgagtttggcaacttccgggtaagcggctttgattttgtccacccacggctgaatttctttcatgtcgcgtgtggatttgttgccgaaaatcgagcttaaaaattcattaaatcccattttatatctatttttattattatttactaagttgattgagtgcgcaaagttactgatttttatacagattacacatttttgcgctgtttatttgatgtgagtctaggctagttaaatgataatttgtaaacctgttatcaaagattaggcgcggattacacggattacgcggattaaaggctacgctattacattgattcataaaaaatccgtgtaatccgcgcctaaaattatcatttaattccgagacctcagaaattcagtggagtctctgtgcaagcattcggagcgcggatgcgcatcacacttgacagggtgggggctacgcgggtaatattgacgggaacccggatcgtttcgggcttcactccaccgcccaggaagatgagcggagcaggaacattggcatgacgtaccacacggttatcggtggcattttcttccacgatagtccagccgggcaatacgtctatcagtaagtcgcccgaacgtttgcgatgaaagctgttccgggcaagttctatctggggcgaccagggacccagcagcaggcggtgggctgaatacgcctcgttcactccgctgaactgtatcaggaagtcggcggacttgtcttgaatttccgccagattcagctgcttgttctctattaatttatggttgagataaatttgctggttatgataagtctctacgtactgtccttcgccatacgtggccatgagatacatgttcagcagggtggcgcagcggttcaggtagaattccccgccggggatgcggtacaggccgagatcgggagcttccggatcggcatagcccgtagaggtgatgcagaagacgacgttgtgcagacctactttgcggtcgatgaggtcgagcagtgcggcaatgctgcggtcgaggcgtacatacgtgtcctgcatttccatggcacattcctgcgtactcttatggttgtagtttccggcgtaataggtcagtgccaacaggtcgggtatctcatctttggcgatggtgctcttttccagaagttcttctgtcagcaggttcacttcgtcgttgatgaacgggctggtgagcagtcggcggaatttattgcgtcgttcgctgtcgaacttatatttgaagggctggtcccgccattcgggcaggaatgtatatttgttgatggggtgtaccggttcccataccatgtcgcggatgcggaagtcgggtgatttccgttcgttgtactggcttacccaccacgggaactcgctgtaatatgtagtgctgcaccatttgcctgtgttctcgttcagccagaaagcaccgtttccggtatgtccggcagccagtacggccgcgtcgcgcgagggggcgatggcatacaccaggcctttgttgcgggtggctactttcagttcgtcggcaatggtagaggtcagtaattgggagggagaagagttttcgtcggtgaagttgcccataaatgcgccgtcgtccacgcaattcacggggcgcagggtgcttgcatccatccagtactgggatatgatgccgttcatcgaaggcgtcgtgccgctgtagatggcagcgatggcagaagcgcggtctgttccgttgaaagggaattcggtctggtagaacactttcccttcgcgcatcagtcttttgaaacctttctctccgtagagggttgagaatgcttccatatagtcggtgcgcagttggtcaatcgtcagcgtaaccactaatttaggtgtggcaggcaacggttgtgcttgcagaccggtgaaagtaagtgcgagtatggaagtaatcagtccctttttcatttatctctttttcaatgtcaaaataagattgcttgctgaacgtaccagcaaacaaagtgccaaaggtaatacagctaagtcaattctttgcggtattatcgcccaaagcagtataaaaagtgttaaaacagcgcaattcgtcctcatgtaccagcttttctgccgttttctcaccttatttatcatccacgggaggcaaaataagtgcaggggatggaatacgaacagcaggtaattggggcttactgcggggtgttgggagaacagggcgaggaaagcgaggatgcacccggctattccggcacagaagaacaggattaggtcgagtccccagagggttttcccgcggcggatgccgtagatggtagcggctgccaccagcacaaacagcagcagggccgattgcatcggggtgattcctccggagcggtggtcggcatcagtcagtccggttaccactattttctcttcggaggatacgaggggacgtgcctggccttcgttgtctacaatccgggctgtgttgaagaagtcctgcacatagaaggggacgaacatcatcagtcgtcggttgatgggttggtcggctttgctgcccatgcacaggtccatgccgaagcgtgaccacggatggccttcactatatttatgcagcaaatcgcggaaagtgactcccgtgtcggtatcggtcatattgtcagcatactgcaaggtgccgtcgatggcggcttctatctggtcgcgcggacgggtggcgcagttgtcgtagaagaagttatagcgatatatgcggttttcgggccggtagttttcctgaagcaggttgaagaggtgttctttttctgcttgggtgaggttcagggtctgttgccagacgtcccgtcccaggtagttgtactcggaggcgaagtgctcgtaattggttacgcctagttgatagtccgtctctcccagggcgaagcggaagatgaagttgggggcgttgaaattgaacatgccgtagttgaagacggcgtcaatgccccgggtgaagttttcgtaacggatggcggtgtggccgaacagggaatagatttccccacccgaggcgcaggtcagcaggctgatgcggatggagtcgggggtagcttcttgcggcgtttgcggctgggcggaggccgtggacgggcagaggaggcggaggaggaaatatatgagaatgagtaagtttcttttcatgctgtaaagttataaactggaaaattctgaataggtgagaatacgagtctgtaaatgagcctttaaaactaataagtctttgtctccggtcagaatatagtcagcgtgtactgtttcggctaaagatagtaagtataaatcttttgcatctctgataggtgattgggctttggtctttatcgatacaaaatggcaatatgcatccattatttttaaagtatcccaaatgtcttgttcgaatatgtatttacgtattttccctctctgagatacatctttaaattcttgtatcaattcatcacacacatatactgtaatatcagaattagtcagtaatttttttaataaggataaccttttgcctattaaaaaagaaatccaaagattggtatcgacaattattttcatttacggtatcttacagcatttatctcttccataatatcttcatcagacaattcgactttagtgggacgttttgatatgtagtttttcaataaactttctttggtttcaatagaccatcccattttttttgccaattccttaaagaatttcatgtcggctttcggaatgttaagataaacgctttgtattgtagtttccatattctttgctttttagttttcacaaaagtacattttttttagttagggcgcaatgaaaagatagttaattatgcgaatcagggggtgagtttgatttataacgaaatggtaatgaataagactcaccacagattacacagattcacacagatttattaatctaataatcactaaaatagaatctgtgtcaatctgtgtaatctgtggtgaattcattcataaccgtatagatatgaatcaattcaactcctgattcgcattaattatcaatttgaaaatagacaagaaataaaacaagcaatgttccggcgataaagaagcaatcttatgatagacagcattgcttcttgtcctccggaacattgcttctgatcagggcgcttcgagaaaatctatcaataattgcacttggcgcttgctgaaggtctggtcattttttccttcacggccgccgtagagctggcggtgcagttcgggattgacggcgatccacttccgcagttttttcagtgcggcttcggccgagaggcaggggaaatagagctgtgcgaactcggtcttcaggtatgccttgatttcaaatttatcttcgggagtctcttttttatcttcgggaatccttttcgttttttctgttgtttccatgttctatgaattttaagaatttgttgttttgaagtttttagtctgaattattcgtggaggtttatcgggaagtccggaacaattgcagactaaagtagaatatttacataatgcagccatttccggccgctttttttgcccgtgtcagtgacaaaatggtgacagtgacatctatacacctatttggtgctctttgtgttgcacttcttatagttatctccttcttttataataagttgggctttgacggctttttgtatccagcgttttccggttcgtgcgcaggctccattttcctgtacggcccggacgaaatccatgtaggtaaaaactcttggcatggatgcaagggtgtcctcaagctggtggaacttgtgcatgctcacgggcggcagactggtgtcgggcagcgaggtgctgagcagaagactgtgttcgagcagcgtgtgggcgatgtccatggctgtccggaaatcatcgtccgtgcagcagtattccttcgcgtaagcgtagtcggtgtatttccggaaaatggtgagaatggctgccaggcgcatggcaagcagtccgttgcggtaaacgataccgcttgaagattcgcgtccttccagcagggtgcgtctcagcaggaggctgaagtgggcggtatgttgttgccactgttggggactgaaggtgacgagggtgggcgactggagcagcagcttgtgcatttcaaacagttcgcttcccaacccgtagaagtagctgtgcaggtccacttccccttcctggggtgcgcacgattcccacaactggctttgctggcgggtgtagatgccgaagcggctgtagagtcccacttcgagcgaacggaagaagttgcggaactgttcctgcgtaccggcgatgctcagtgccaggtgggggtggcgaacaacgatggggtcgccgtctatcttgtaagaagaggagatttcttcgtgatgggccgccttacagaggatgtcttcgtatttgccgcaatcttgtcccagcgaggagaccagggtgttgatttcggtagtagtcatgcagcaacctatttcgccggcagcggcaaggctctgtatgagccggctcttactggtggtggctgagattttgaggtattgcgcctggggctcttccggtttcaggtcgaggttgggcaggcgtttggcgtgccgggcctgctgctgttcctgctcccaggccagtagtttctgatcgtattcctttttctgttcgcggcgcagtcggtcgtagaactcctgcgtggcgtccagcagtatggatgtgaaccccagcgcaccttttccggctcctgcgggtgctacgacggcaagatagaaatggggcgaaagcagtgacttcttatagaagaaactgacgttgggaaagagggcgctacaactgttcatgctgcccagcagcatgaggtcgcgttcgcgcttgtcggtggcatgtgtgcagcaacgtttcagaaattcgggcaggcgggtataaacttcctcggggatgtatggggaagcggcccgtaattcgttgtttttttctaacacttcttcgggtgattcctcctcgtttgcaaccgaaaaaggtgcataggtgtcactgtcaccgaaatggcaccgattcgtctctttttcttcctttttcttctgaataatgaactgataaccagatactacgcgtttttgtatatcttgcatcgtaaaatcggtagcggcgtaatgctgcgcgaaaagttcggtgagcttttttgtttcctcctgcgaaaatcccttacttgctgccgcacgtcccaacttcagggcaaggtcgttccgactaccccggatgaaggggttgcggtgttcgaattcatcgaggaagttggctatgaagccattttccgatggggcgttacccggggcgattgtttctttcgtttctgcctctgttaccttcgttacgctttccgcaggcatttcgaaggcgattgcaccgggattgtagtaggcttcgggatgccaggagtagaaacagggctgcgtcagtatcttgcatttatcatcgtacgggtgacctacgtgtgcgctgaccgctctgcctacggctgcataaagctgttcgtaatttttctgcacgtcttcgggacggacgtgtatcagcattttgtttccttcttcggagatgctgataaaggaggcggcaacaaaggggagcgattgggagaggaggaagatttcccgggtgcgtccgttgctgtggtcgaggtcgatgcagagcagttcgctgtgttgttgcaggtcttttacggcgtgtccgttgctgcatacgcctgcggggatgatgcacggcataccgtctttcagtttctgtgcttcggcttcgtggccgggcagggctttcaggcgacggtagtcctgcactacttgcctgaagcggtcgctgcgtaccgtgtcaataaaatcgtggatactgatggtgtgtggtgctttgctccgcacgcttgggaattcggaaaccaggggttcccgatttactgtattttccatatctgtttatgttttacagtcgtgcattggcactattgcctttacacgcctcgaaggtatggaaaacattttttagatactttgcgcttttgtacacttaccttttttaatgttttgattatcagtacggaggaacggttgaagtgtacaaaatgcttttttggataaatttaacagctacaagatacaacagcttttaagtaacacttaaaaaataggttggtacataagaaagtgcggagagtaagcttataaatgataatttaccagcgtagcgctggagcaaggttctccttcggcgtgcaagtaatctttcagacacggatgacacggatgacgcggattcttttttccttcggtgtgatatgccggtatgtatagcgcagctttaaaaatccgcgtcatccgtgtcatccgcgtctaaaagattaaagtccgcgttcgtccgccttatccgcgtagtccgcgtacccattccctcgccgctaaattatcatttatgtaccaacttgtttttaagcgttaccaaattcttttcctgcttttttctttttttgcaatcagcgacgaacttgtctatttctttgctgagttgcttcagttccctgcatgcctggtcgcttagttcgtgttccctgttcaatttttccaggtatttttttatttgtctgatggcttgcagttcggctttaccggttgtctcgcagtgtttgtaaaggatgtcttcctgtgtgtcagtagttagctggctgttctttttaaactcatggttatgtgtatttaaaatatttgattctgcaaaggtaaatagatttatgcaggttggggaataatccggggtaaaagtaaaaataaataaggtaaagtacggataagttcgtcccggtacgtcccggtacatcccgtttcgtcctttcgtttttagtctctgaagtacctttgttgtgtcctcaaagtggggatcctacggaaggtttcgggtaagacgtcgccttgtatcagtttccgttcgaaactattttcttcttttttaaactcaaaaaaaattatgtcagtaacatttaagaaagtattacgtaaagaccctttccataaagatggtacgggtaaatactaccctcaattaatcgtttggggaaaatcggcgacactggaaagtattgctgttcagatgaaagaatccagttcgctcactctgggtgatatacagagtgtgataaccaacttcgttggtgctatgcgtcgtgagcttttcaatggccgttcggtaaacatcgacaacttcggtgtattcagcctttcggctactaccgaaggttcggagaagaaggacgactgtcaatctaccaagatcagatccgtccgtatcaacttccgtgcctccagcagtattcgtccgcaggtggctgccacgcgtgccgaagaccgtatggacttcgtagatctggagtcgcagttgaaggctgccggcagtggttcgggcggtggcgaaggtggcggcaacgaaggcggtgacggaggattggacgagaatccgctgggataggctctgaaaccgtagtcttcggaaattaaaaattaaacacttatcattaagttacatgagaacaatcgatcacatcgttattcactgttccgccacacgcgaagaccgttcgctgactgtggccgaactggaggaaaatcaccgttgccgtggcttccgcggtatcggctatcactactacatccgtaaggatggcacggtaatcaatacccgtgctttggaacttgtcggggcgcatgccaagggccataattctcactcgataggcatctgctatgagggcggtctggatgtccgggggcgtgccaaagatacccgtacgcctgaacaacgctctgcgctccggctgcttgtgcatcaactcctgaaacgctttcggaacaatgtccgtatctgcgggcatcgtgacctcagtccggacctgaacggtgacggagtgatagagccggaagaatggattaaggagtgtccgtgcttcgaagtgaacagggaactgtgatttccactctgtgacaatcattttttttaattgcgtggaaaggaggtgtggaattatggcaatcaagaaatccgtatggagtatgatcttgaaagtagctgtcgcggtggtaacggcgatagcgggtgtgctgggcgtaaatgcgatgaccctgtaatgcgctctgataatgacttctaattttctgtaaaccggcaatccggatgctggtttgcagaaaacgatattaaactacaaacaataatggatatgaaaaatatatatcgaattatacttattattatactatgcaccagtgtattgccggtatgtgcacaaggcaattattatgctgcgatgcctgatgtgacaccgccttcacctacttcccgagtatttcagaagtttttgggctatcccatttctcatgcgacgggaaccattgacattagtatccctctatatactgtggaagcttacggcttgtctctccccttgactttgaagtatcattcttcgggggtaagagtgcaggatcctgtcggtgtggtgggacgtaactgggctttgtttccgggatttaagatatcacggacgattatgggcaaaccggatgaggtgtatccggtggcagatgtcagcggaaatctgacacgcgatgactatatctatatgtcttctccttattcaaatgattgtgattgttggaatgagcgcggacatatttatccgtgtatggacggccagtatgatgtctttcaaataaatatgcctggtatgaacgcttcgttcatattacaacgtgtaaacggggtggatgtagtgaaacagatatcggatactcctttaaagataactcctaagttggataattctaccaactttattagtacacgactctatggttttgaaattctggatgacaaaggtatacggtatgccttcggggagaagaatcctgtacatggtttatctagtccacaaaaatatgttgaatatcagccttatggttcttgcttttgcggttggatgcttcgggaaatcattttccccggtaatgaaaaaatctcgttcacataccaatcggtaagagaagatgtcccaactttcaatcataccttatcggtattagacaatgggaaatcgatgtggctggctggctgttttcataacgatatgatagatagttccactggatctgacagttctttttggcgtatacttggaggtgatggataccagataaatgaaggaagagactccccttattcttatataaacaggtcgttggttcctgatagtattattattccaaacggtttgattgatttaaactattcagcaggtaagttggcttctttgaatgtgaaacaatcgtcaggcatacaagtgagaaatgtacagtttacttatgatacaacaacgggtaacctgctgaagaaagtgaatatcaacggtgagggcaattatctgtttacctacaaaaatgaaagttcttttagttatttgcgttccggtttcgattggtggggtttttataatgaagcggatttcggggatgctgaccttcccaatataaatcttgaaatacggaagaccacgggttcgttgaatgttcctgtcaaccgaactatcggtaatcgtgccaacaggaagcctaatgctgcgtatatggacacatattcattgacagagatgctcagtccgacaaagggaaaattgaaaattagttatgaaccacaccgctttacggtaaaaagaaaagaggaaataggtggagggttacgtgtgaaatctactgagttgtatgatccggtgtcaggtaagacaatcgtaaaaaactatacttatgaagatgcgcattttataggtacggattatcctgatgagaaaagtctgataactaccagatatatatgtcctcttgatgatggtggttgcagagtacgccaacgtacgctttctgtattttccggttttcccaatgttcggggaaatacaaatcctgtatggtatggcaagattactgaagttgcctccgattggaaaaaagtctatcaatatgattttcgaccggatgaatatgataatgtcatttttgatgatttatcccctgattattcattgaataatgagtgtttgctttctgcaatgaatagaatgttatatccgattccttggttattatcagaaaacttctataggaaatcgggaaatatttatgagaaagtgcaatcattgaccaatatgtatgagaagtctgagatgaaaatgccggcagctatagtaaccccttatcaattcggactgaatggctactcgagctgtcagtttatggaaaagctgatagcttgccctggttataattattgtgatgtatatggatctccggtaaagtcttttccgtattatatagctacaggctatcatcgcttgaagtccacttgtaaaaccacttatcaatcgagcgacagtattgttgagaagtctgtttttgcctatgatacggagcgtccgtacaatataataagtaaatcatctttgtgtagcggaggtgcggagcaggtggagagaacctattacagtaataacactataccggataaagaatctttgacaacatcccagcgaagtgccattcagctattgacttcgcgaaattatctgaccacgcctgtacagcagactatggagaaaaaggataaacggctatacagtgtattgagaggatatagcagtagcttgtcttccgggatggtggtggaagatcagtattactgtaaaggtacggataagtacgaaaaacgaatcagttataataaatatgatatttatggtaaccctgtatatatcaataaggatgatgctgagaaggttgtatatttgtggggatacaaggggcaatacctgctggctgaaatcaagggggcaacttacgaagaagttaaaaaagcgctaatggtggatccagcttccatgtcgtcgtgcatacttccttctatacctctgtatctggatatgatagataatttgtataaagctttgccttctgccctgattacctcctatacttaccatcccttgattggggcaagtggcataatttctcccaataaagccaaaacgactttcgaatataacagcgatagtcagttgattcgcataaaggatacggaaggaaagacaatggaggaatatcaatatcatttccggccataaatgcagtatgatcatataaaaatagtattatgaaacgattatatattttgatttcatttctttgcctgatagatgcagctacagcgcaaaatagtaaccagaattatgtggttacgcgtactatgctgaatgaaagcagtagttcttacttagatgtagtgaaatattatgatggtttgggacgtttgtgccaaaccgtgcataatcaggtgactccacagaaaaataatctgctggatctttcggagtatgatgaatcggggcgggacgttaaagactggctgcccgtatattcatcctctgcttatttgtctgcgtctgctttttcctcgactgcttccggtaattatggctcaacggcccgtcctttcaatcagtcggtgtacgaggcttctccgtccgatcggcttgtggcgcaatatggcccgggagcgaagtggagtgacaaaccgatgaccactgattatatgctgaatggctcctctgaggtattaagctgtgtgcactattcggtaaatggtagcaccttagtgaatgggggaagttatgccaccggtgaattgtatgttgtccgtacacaggatgaagacggcaacacggtctctcaatttacggataagcaaggacataccgtattggttagtcagttgaatggaactgtacgtcatgatacctattatgtgtacgatgactatgacaatctttgctatgtgttgccacctgcaatggatggtaatatttctacggccagtctaaatctttatgcctaccagtataaatatgacaggcgcaatcgttgtgtttggaagaagttgcccggtgcagatgctgtgtcatacgtttatgatttgaatgatcgtcttgttttttcccaggacggaaatcagaaaagtcggggaaaatggatgttctatttgtatgatgacttaagccgcctggttgtgcaaggtgaatgtgctaatacgaatacttctacagcgtccgctcgttctgttgcctgtactcgcgtcaatacggctacgggtttaggaaacagcggatattcatccgattttgctttaactgctccggttgtgtatttggtgaactattatgataattatgatttccgtacattgccgggttttaataacagctttttttctgctgaaacagtgagtgctaaaggttacttgtcggggagtgtcattacagttttaggaagtgaaacgaagttgtattcagccaactattatgataagaaagggcgggtaacaaagactgtttcaagcaatctgttgagtggctatgaaacaacaactacgatatatacttttaccggtaaacctgcaagcgtgaagcatgtacacatggcggccggaaagactacgcagatggagatatatacctatacttatgatcatgcggaacgcctgacgaaggttgagcatacgctgaacggagccaaggttacgcttgctgccaatacttatgatgaactggggcgattgtcgggcaagtcattgcatggttcggcaagtaataagttggcgtatgcatataatatacgtaactggatagaatcgatatcatcaggtggattattcaatatatcattgtattatggctataatggaaatgtatcccgtatggtgtgccgatgtccgggggataacaaaacttatggatataacttcgcttatgataatttgtcacgcctcacctcggcacaaagtctgattggtggcgtaataactctgggctacgcgaccaactatagttatgacaagaatgggaatttattgcatttgcggcgtggcggacaaaccggattatccggcactggaatcattgataatttgtcttttacattaaatggtaaccagcttaaatccgtcaatgatgacgctacggctacggcttctaacggcttcgaattcaaggatggtgccaagcttgctacagaatatatgtatgatgccaatggcagcttaataaaagatttgaataaggggatcgaaattcaatataatttattaaatttgccaagtcaggtcaagttctcggatggaagtaccatcacttatacttatggtgcggatggagtaaagcttcgcacggtgcataaaataggaggtgttactaccactaccgattactgcgacaatgtgatctatgaaaatggtacggctaaacaattgctgaccgaagaaggatatgtctctctgtctgataagaaatatcactattacctgaaagatcatcagggaaataatcgggtggtaactgatcaggccggtgggatggaggaagccaactactattatcctttcggaggtgtcttcttaagtaacgggaatgatgttcaggcttataagtataacgggaaggaactggatacaaagaagggactgaactggtatgattatggggcgagagagtatgatgcggtgctgggaagatttacgacgatggacccttcttcagagagttattattctaccagcccttatgcgtattgtggcaataatcctgttaatcgtatagatccgaccggtacagactggtatcgagttaaaagtagtgaggaaaagtgggagtatgtttgggattcagatattcattctcagtctgaacttgataaattaaaaaatgatgcaacttatttaggtaaaacttatatagatgaaaataaaacttactatagtttatttggtagcaaggtaaatgcagaaactttagaaggtagtatttatcaacttgtagataaaggcataattgctacggcagaatataaccaagaggaacaagtttcttggggaggggaagatattcctaagcctaaggtagacttctcaatagaagagataaccgcttcagatagtaaatatcttggtattgattctcatcgaaatgagtacaatattagttatgaaaatagtgcgaagggagtgtaccgggttgttaacggtgagggcttaatgaaagcgtcgatgagagattggattggagatagtgatatgcccaaacatattggaggttggcaaagtggatcccgaatgtaccatattcgttttatgaataaaggaggatatgatattgttcatttacaattctctgctaagaatgctaatgcgttattgcaaaaatataataaattattttcaagatagaatgaagaagaatgttatatatctcgttttcttttttttacttttaggttgcgttagttctcgcccggaaaaggatgtggctatccatgatttgcaatatgatttatctcggtatataaaggattattattgtatatatttgaaatatccaactgtaaatgaactttgtgatttttgttgggatattgtgaatagtgccaatgaatgtcgttttaggacatattgtgaatatcaaaacgaagaaagacttaatataaatgggacaggtgcggaatatcttctttcttttttgaaagaaaatcatgataatatcctttttcaaaaggaaggtcaaatattagtaatcctatggcagtcgaagcttttgcagacagtccatttgaattattgtgatttaatcaacgagtcttataatagatggaatttcttttccttctttgattcattagggaattataaaaggatagataatgatgaggaagatttcattgctatgaggaaaaaggtaaaacagaaatatcagtctgttgacaatgggcagggtgaaatattgaaaccttatttgattagatatgatagaatttctaaatatgcttttttatgccctcaggattctgaaatagcaagtaaaccatatttaaaggatttcgagattttattagattcatttcttttaaaaaagaaaatgcaaatgatacaatttgtatccttcattcctccgtttgattctgaacataaggatttttaatccgttatctgattttccctgtctctgaaagcgaaatgattttagaggcagggcttatttattgtcttttgttggaaaatctcaactaaatagtttatttgtccttactcgtttatatgtttacatttgtatttgtcatccaataatttacataaaaagactccaaccgagtgctattctcaagaaaaatagtatttttggaaaaattactgaaaaggatacctttgtatataactttaaaaagaaccgactattatgatggaaaaaaacactggttattttgaaaccatgtacccacgtcctgttatctctagttcttctttcaaatcaataatgaaacataattcacaagggaatatgatatatagaataaaaaagatagctgtatgaaaaatataaaatggtctcctatattagtcctatttccgtttataataacgttacatactttatggagaatatatatttgtgcatggactgcatttagcttttatgttataataggatttattgcgataatgcttattgtacttttattagatcgctttttggtaatgtgtgtaacggcaaagatcgtttggctgactgaaactctggttatattatttgtattgcttatattctttagtaaatgtacataatgatagattctaaagtattactatttaggaaaccctaattagctaatcatctgatggtgatttggattaaaactcaagttcaccaagtaatatagacactaaattatattacgagaataagaaagaaaatagtaaaattaaaaaagttgaaatggaacaattaaacaaggagtataaaatttatgaataaaaaatgagaggcaaaaagatgttttatttggtgatagtagatacaagacagactaaaaaaatagattgtatgagaaatgtattattaatattattacttatttctttgccgggttgtcaacccggcaaagaatcccctgctcgttctactgctttacgggaagttaagcggttgattgatcaagattcttttcctgcgaagtatatcattatgtatgaggaaccatcgaatgacatcggttctatctatatgataacaccggctaactctccattggtggaagggagtttggaaagaccggagaaagtgataaagtacaaggataggtatatctgcttaatgaatcctatggaatcaactgatatgcccaaaaataaattgattgagataacggattatccgaatgatacaacaacaggtcctgtatatgatgaaatatggtatataggggtgtctaaaaatgggaagaaacataccttggtctctacaatatataagtcttacctcacttattattattattcttttcctcaactcttggaatatgcattcaaagattatgattcgacccatttaccacgctttatattgtcttcatattctttagttgtggatagttcatacatacccaaagggatattgtataatcatatccaacgcattgatggaaaaatatattattccaatgttttagatgagtattttaaagaaaataaagatagtatacgtaaggacttttttgcagtattaaatgggaaagatacacttaaactaaatattgtagatacgataacacagcatcttttctttgagagtgcgaataatgctgctttctttagatcgctaacaaaagaaccttgggataaattatacgatttgcttcgcgactcgactttttatttttgtgctgaaaaaggcacgcatgtcaggcactccgttccgtatagtgactattattggctttttagtatacacgataattgttcttataaatatgtagatgaggtttatagaagagggataaagcagagcttgaaggatttatacggtagttatgaagaatgggatgcaaattgatttcatttataggattcaatgatggttttgttggtatgatattccctgtctcttaactccgaaatatgggtagaggcagggaatatttattctcctccctgtcctacaatacggacggtctgaacggcatgagatgctacaacggcaatatctttggactgaaacgctacgggtgtcaaacttgctattgaatatacgtatgataccaatggcagcttaataaaagatttgaataagggaatcgaaattcaatataatttattaaatttgccaagtcaggtcaagttctcggatggaagtaccatcacttatacttatggtgcggatggagtaaagcttcgcacggtgcataaaataggaggtgttacccaaaggatgggaacatggctatactaggggattagctttttataaaaactctgttgtttattggcttgaagtttggtaaatatgttgagtaatatgtactgcgccttactcgtttatatgtttacatttgtatttgtcatccaataatttacataaaaagactccaacagagtgctattctcgagaaaaatagtatttttggaagaattattgaaaaggatacctttatatataactttaaaaatacccgactattatgatggaaaaaacactggttattttgaaaccatgtaccctccaaagaggcttggtaggtgagattacgaacagattcgaacgtaaaggcttgcgtctggccggaatgaaaatggttcagttgacggatgaagtgctcagtgagcattacgcccatttaagtgcgaaacccttctttcagcgcgtgaaggattcgatgatggcctgtccggttatcgtgtgttgctttgagggggtagatgccattgaagcggtgagggttttgaccggccctaccaatggcaggaaggcagctcccggaaccatccgcggagattacagtatgagcttccaggaaaatatcgttcatgcatccgactcacccgaagcggctgaagcggaattgaaaagattttttaaaccagaagaaatatttgactataaacaggctacattcgacttcctgtatgctaatgacgagtattagcgaggaaaaagaaaaataagtttgcgacaaactacgctgatgtagtaaggaaaatgtcgactacagctttcaaattcaattaaagtcgtatctttgtgcccggaaaattaatcttcattcagtgaacctggttattgatataggaaatacggtggcaaaagtagctgtctttgatggtgtttcactattggaagtggcgtatgactctaatcggaatttggagcatttgtcggacatctatagtaaatatcactttgaaaaagcaattgtagccacggtcatcgacttgagcgagcaagtgctggcacaattggcattacttcccatacctgtgctttggctgaatgaaacgactccactcccggtagtgaatctatatgaaacaccccggacgctggggtatgatcgtatggctgccgtagtggctgccaatgaacaatttcccggaaaagacatactggtgatagatgccggcacgtgcattacgtacgaatttgtggatgccgaaggacgctatcatggtggaaatatttccccgggtatgcagatgcgttttcgggcgcttcaccagtttaccggacgcttgccgctggtgcaacgcgaagggcgtgaactcccgatgggaaaagatactgaaactgccatccgtgcgggagttttgaaaggtatggaatatgagatttctggttacatagtggctatgaaacataaatatcctgaacttttggtttttttaacgggcggggatgatttttcttttgatacaaacttaaaaagtatcatctttgcagacagatttttagtgttgaaaggattaaatcgaattttaaactataataatgacaagatttagacaaacacttttggtgcttttgctcacgatattatctggagcgacggtcgctcaaaataatacaaattctccctatacacgatacggatacggacaactggcagaccatgggtcaggtaacagtaaggcaatgggtggcattgcttatggtttacgtgacaaatatcagaccaatttcgcgaatccggcatcttatacggcagttgactcgttaactttcatgttcgacggaggtatttctatgcaaaacaccaacttcagcgatggagtagtgaagatgaatgccaagaactcaagttttgactacattacgatgcagttccggctgtcaaaaaagggcgccatgagtataggattgttaccttattccaatgtgggatataaaatgggtaactatcaggaaaacactgaaactccgacttcctcagccagtacaacttattccggtgaaggaggcttacatcaactttatataggcgcaggttttaaaattattaaaaatctttccgttggtgcgaatatttcgtatctttggggagacataacacatacgcggcaacagtcatttacatctaactcaaatatcatgccgttgacaacgcttaccgggatggaaattacgagttataaacttgactttggagcgcagtacacacagcaattcggtaagaaacatgcggctactttgggagtcgttttctcaccgggacataatttgggaaatgatgcgtatgtacaaacccagctgggcaatcagaacactggatatactacaacgcagaaggacactatactgacaatgggtattcctatgacgttgggcgcaggtgtgacgtatgtgtacgatgatcgtctgacagtgggtgcggatgtgatgttccagaaatggaacagtgtgacattcatgaatgacccggatgcgttctgtaataaagtgaaagttgctttaggtgcggaatatattcctaacatgatgggtagaagttatctttcacacatcaaatatcgtttgggagcttattattctaaaccttattataagatagatggcgtacgtgccgcaaatgaatacggagtaactgccggtttcggtttgcctcttccacgtagccgttccgtattgagtgtctcagcacagtatgtgagaacgcaaggcacggaaagcaaattcttgaacgagaatacattgcgtctttgcattggcgtgacattcaatgaacgttggttctggaagcgtaaagttgaatagtgaagaatagacaatataacaactaaaatttaaatacaatgaagattaaaacgcttgtagctgtcttgctcctttcgggtggagtaaccagtgtcctggcacaggaagattgtaacaagaacagtagtatttctcatgaagcggtaagagctagtaactttaaagatgcttacttgccgtggaaagaagttctgaaggattgccctacgttgcggtattatacatacacggatggtattaaaatattaacatctttcttgaatgatataaaggaccgtaattctgctgattacaagaagtattttgatgaactgatggaggtttttgatttgagaattaaatatactccggattttatgcatctgaaaggtactccttctgtaggcgacgttttgggtaataaagctattaactacattgcttatgctcctaatatagatgtaaatcaagcttatgcttggttgaaagaatctctggaaactgaaaagggtggctctaaaggtcctatcctccactattttctggatatgtctttgaataaattgaaagctgatcctaatcataaggaacaatttattcaggattatctgactgattccgaatacgccgatgctgctatcgccgcagaagatgacgcgaaaaagaaagctgctttgcaacaagtgaaagataacctcgtagcaatgttcatcaatagtggtaccgctgattgtgaatctttgcagggtatttatggtcctaaaattgaagcgaaccaatcagactctacttacctgaagaaagctatctctgtcttgaagatgatgaagtgtacggaaagcgaagcatacttccaggcttcttattatatgtataagattgacccgactgctgatgcagctaccggatgcggatatatggcatataagaaaggtgactttgacacggcaatcaaatactttgatgaagcgctgactttggagagtgataatgaaaagaaagctcagattgcttatgctgttgctgccacattattcaatgtgaagaaactttcacaggccagaggttatctgcaaaaagctatcagtttcaaagaaaactatggtgatgcttatatcttgcttgcacaactttatgcttccagcccgaactggaatgatgaggcggctttgaataagtgtacatattttgttgttattgacaaactgcaacgcgctaaagctgtggatcccactgtagcggataaagcaaacgaattgatttcaacgtatgcacgttatacaccgaaagctgaagacctctttatgttgggtatcaaagccggtgaccgcgttacggtaggcggttggatcggtgaaagcacaacggttcgataagaaatataaatatgttaccacaacgaagtaacgttctattttgtagaagtttgagcataaccattgcctttggggcagtggttatgcttcttttattttccgcctgttccggacggcataaggatatgggagctgccataaccgagcgtgattcattgcctgtgatggatacgaaaggagtgatgactttaatctctgattccggcgtcacccgctatcgaatcaatacggaggagtggctggtctttgaccggaagaatccgccctactgggcttttgaaaaaggtgtctatctggaaaagtttgattctgtattcaatgtagatgcaagtataaagtcggatacggcatattattatgaaaagcaaaagttgtggaaactgatgagtaatgtgcatattcaaaatcttaaaggtgagaagtttgatacagacctgttgtattgggatcagaataaacatacgatttattctgaccggtttatccgtattgaacaaccggacaggatcattactggtcgtggtttcgactctaacgaacaaatgaccgtttatacaataagaaaaccggagggcatcttttatgtagatgatgatgccacagctcctgcagacagcgtgcaaactgacagtatgccgaaagatagtatcaaaccgtaaattatggatacctatatttatttattgattactatggctttctccgctttcttttcgggtatggagattgcttttgtttccgtagacaaactacgttttgaaatggaacgtaaggagggattgacgtctcgcattctttcttatttcttccgtaattccaataacttcatatctaccatgctggtaggtaataatattgcgctggttatttatggtatcctcatggcgcaagttatcaaagtccacctcctgggcgatttgatctccaatgattttgtggaagtgttgttgcagacagtcatttctacgcttattatcctggtaacaggtgaattccttcctaaaaccttattcaagattaaccccaatcttgtattaaaagtatgcgcttttccgctactgatttgttatatcgttttgtacccggtgtctcagctggcttctggattatcttaccttttcttgcgtctgttcgggatgaagatcaataaagaagcttcggacaaggcttttggaaaagtagatctggattattttgtccagtccagtatcgataatgctgaagatgaagaagaactggatgccgaggtgaagatatttcagaatgcgctcgacttctccagtattaaaatacgcgattgcatcgtaccccgcacggaaattgtagccgttgacctgactgccactctggaagatttgaaaagtctttttgttgagtccggtatctccaagattatagtgtatgacggcaatatagataatgtggtagggtatatccattcgtccgaaatgttccgcaatcctgtcgactggcggaataatgtaaaagaagtgcccattgtgcccgaaaccatggcagcgcataaactgatgaagctcttcatgcagcagaagaaaacggttgccgtagtggtggatgagtttggcggtacgtccggcatcgtatcgctggaggatctggtagaagaaatattcggtgatatagaggatgaacatgataacacttcgtatgtgtgcaagcagattggtgaacacgaatatgtgctttcgggtcgcttggaaatagaaaaggtaaatgagacatttgatctggatctgccggaagaagatgattatatgacagtgggtggattgatcctgaaccgttatcagagtttcccgaaattgcatgaagtagtgacgattgataaatttcagttcaaaattattaaggttacagccactaaaatagagttggtacgtcttaaagtggtggaataataacagaatggcgtaattttttaaagaataaatagatgcgtattagcattttttgtatcttcgtgcgctaaaatgaagtttggagaaaatataataaacaaataaatcatattaactaaaatggcaacattacaaaacattcggtctaaaggacccttattggtgattgttattggtttggcgctgttcgctttcattgcgggagacgcatggaaggtattgcagccacaccagtcacatgatgtaggagaggttaacggagagtcactttccgctcaggattatcagagcttggtagaagaatatactgaagttgtgaaattttccagaggaacaagtgcactcacagatgaagaaaacaatcagattaaagatgaagtttggagaaactacgttaacaataagttgattgagaacgaagcaaaaaaacttggtttgtcagtttctaaagcagaactccagtcaatcattgatgcaggtgtacacccgatgttgcagcagaccccgttccgtaatccgcaaactggtgctttcgacaaagatatgttgaagaagttcctcgtagattactctaaaatgaacacagcgcagatgccggcacagtatgcagaatattatcagtctatgtacaagttctggtctttccttgagaaacaattggttcagactcgtctggctgagaaatatcaggctctggtttcaaagtctcttttctctaatccggtagaagctcaggatgctttcaatgcaagagcggatcagtctgatatgttgctggctgccattccttattcttcaatcgtagactctacagtgaccatcacagatgcagatctgaaagcggcttatgacaagaagaaagagcaattcaaacaatatgtggaaactcgtaacatcaagtttattgatgtacaagtaactgcaagccctgaagacagagatgctatccaacaggaagtaatggaatatactgaacaacttgcaggtactccgggtgattattctacactcgttcgtgctgccggttctgaagttccttacattgatctgtattatacttctaaggcattgcctaccgatgtagctgctcgtttggactctgtttcagtaggtggtgtatatggtccttactacaatgcgactgacaatacgatcaactcgttcaagaaattggctactgcttcaatggcagactctattcagtaccgtcagatacaggtggttgctgaagatgctgcgaagacaaaaactttggctgacagtatctatactgccatcaaaggtggtgcagactttgctgaaatcgctaagaagtatggtcagaccggtgaggctacctggatttcttctgctaactacgaaggtgcacagctggatggtgacaacctgaagtatgtgaatacaatcactactcttggcaagaacgaaatgaccaacctgaacctggcacaggcaaatatcattgtacaggtgatggataagaaggctgttaaagataaatataaagtagccgttattaaacgtccggtagagttcagcaaagaaacttacagcaaggcatacaatgaattcagccagtttattgcttctaacccgacactggagaagatggtagctaatgcagaagatgctggttataagcttttggatagaaacgatttgtatagttctgaacatggtatcggtggtatcagaggtactaaggaagctttgagatgggcattctctgcaaagactggtgaagtatccggtttgtatgagtgtggcgaaagtgaccgtatgttggtagtgggtgtttctgctattgttccggccggttaccgtccgttggctttggtgaaagaccaactgagacttgaattgctgcgtgacaagaaggctgagaagattatggctgacatgaaggctgccggtgctacttcattcgatcaatttaaagctatgcccgaagcagtaagcgattcagtgaaacacgtaacttttgcagctcccgcttatgttccggtactacgtgccagtgaaccactggtaggcgcttatgcatcgattgccgaactgaaccaactgagtgctccgataaagggtaatggcggtgtatttgttcttcaaccgtatgcaaaagataaactgaacgaaactttcaatcaggaaacagaagaaactacgttgcagaatatgcatgcccgtatggcaagccagttcctcaacgacttgtatctgaaagctgatgtgaaagataaccgttatctgttcttctaagaaataacgataattgagatatgaaaagccgtctgatagaatatcaggcggctttttctttatccctgtgtctcattttctgcgcctgcaattgcctttgtgcaactttattcctacctttgcaaagataaactggaaagattgatagataattatgccgaaacaaactcttttaggactgacactcactgaattgcaggaggtggtgaaaagactgggaatgcccgggttttccgccaaacagattgcttcatggctgtatgacaagaaagtgaactccatagacgatatgaccaacttgtcgctgaaacatcgggatctcctgaaagatgtctacgaagtaggagcggaggcacctgtggaagctatgcgttccacagacggtacggtgaaatacttgtatcgggcaggtgataagaactttgtagaggcggtttatattcccgatgaagatcgtgccacactttgcgtatcttctcaggtgggatgtaagatgaactgtaaattctgtatgacgggtaagcaaggcttcagtgccaacctgactgccaatcagataatcaatcagataaattctcttcccgagcgggataaattgaccaacgtggtgatgatgggcatgggcgagcctctggataatctggacgaggtgctgaaagctctggaaatcatgactgcttcttatggatatggatggagtcccaagcggatcacgctctctaccgttggtttgcgcaaaggatttcagcgctttatagaagaatcggaatgtcatctggctgtcagcttacattctccggtcgccttgcaacgtcgcgaactgatgcctgctgagaaatctttctctatcactgaaatggtagacttgttaaaaaactatgattttagtaaacagcgtagactatcttttgaatatattgtttttaagggtgtgaatgattcgttgctctatgctaaggaattgttgaaactcttgcgtggactggactgccgtatcaacctcatccgctttcatgccattcccggtgtagacctggagggagcggatatggaaacaatgactaaactccgtgattacctgacttcccacggtttgtttactacgatacgtgcttcccgcggtgaagatatatttgccgcttgcggcatgctttccactgccaaacaggaagagaataaacaagaattaatataaattattaactttggctcggatgatatacgtattcttcgtagttttgtaaaaacattaactggtaagtatatgagaaagcagctgttttatttaagtctgactattgtagcaattgccctttccgcatgtagtggcggtaagaaaggcgtgtttggtgcgacttcaagtggtcgtgcgtatgaaatcctggtagtggttgatcccgctatgtgggaacgtcctgccggtagggcgctttatgatgtacttgatacggatgtaccggggcttccccagtccgaacgttctttccgtatgatgtacacttctcctgccaactatgatgctacgttaaagttgattcgtaacattattatcgctgatgtacaggatatttatacccagcctaagtttaaatatgcgaaggatgtgtatgctgctccgcaaactatcctgactatacaggctcctgatgaagcttctttcgagcagtttgtgacggagaacaaacagactatcattgatttctttacccgtgcggagatgaaccgacagattacacaactggaaaagaagcataatgattatgtgacgacaaaggtaaagagtatgtttgattgtgatgtctgggtacctgctgaactttcttctaccaagcaaggagagaacttcttctgggctggtacgaatgcagctaccggcgaccagaactttgttatttactctttcccgtacagagataaaaatacatttaccaaggaatattttgtgcagatgcgtgactctgtcatgaaggctaacattccgggagcgagagaaggcatgtatatggcaactgactccttaatgaccgatgttcgtcctcttaatgtacaaggagagtatgcgctggaagctcgtggcctgtggcgtatgaagggggattttatgggtggtccgtttgtttcgcacatgcgtttggatccggtgaaccaacgtattattgttgtggaagcctttatctattcacctgataagttgaaacgtaatctgatgcgccagatggaagcctctctttacactttgagagtgccgggtgataaacagacaggagctgagattccattgggcgtgacgaaagagcagagtaaagctactgatcaaggaaaataatatgtaagaatgtatacgaattaaagagataactttcatccgcagattacgcggattgcacagatttgttttaatctcaatctgcgttatctgcgtaatctgcggatgaagatttatcgttggaacttctggcacattcttatctaaaatgatatatatattgaaaaatggaagataataaaataaaagtcggcattacacaaggagacataaacggtgtgggttatgaagttattctgaaagcattctccgaccccgttatgctggaactgtgtacacctgttatttatggctcccctaaggtggcagcttatcatcgcaagtcactcgatttgccgacgaacttcagtatcgtgagctctgctgcggaagcggcttacaaccgtttgagtgtagtgaactgcacggatgatgaagtgaaagtagaattctcaaaggcagatcctgaagccggaaaggctgcactcggtgctttggaaagagctatcgaggaatataaagagggattgattgacgtgattgtcacagctcccatcaacaagcataccattcagtcggaaacttttgcatttcccggtcatacggaatatatagaagagagactgggcaatggtgccaagtcattgatgattctgatgaaagatgatttccgggtggcattggttaccgggcatatccctgtcagtcagattgcttcgactataacgaaggaactgatagaggagaaactggctatcttcaaccagtcgttgaaacaggacttcgctatcgatgcaccgcgcattgctgtactttctctgaatccgcatgcgggagatgaaggtctgctgggaaaagaagaagaagaaattatcattccggcattgaaagagatgtctgccagaggcatcttgtgctatggaccgtatccggctgacggctttatgggttcaggcaatttcactcattttgacggtgtgcttgccatgtaccacgatcagggactggcaccgttcaaagcactggcgatggacgaaggtgtgaattatactgccggattgcctgtgatacgtacttcaccggctcatggcactgcatacgatattgcaggaaaaggtttggcgagtgaagactctttccgtcaggctatttatgtggctattgatgtgttccgtaatcgcctgcgtgataaagcagcacatgccaatcctttgcgaaaacaatattacgaaaagcgtgatgacagcgataagctgaaactcgatagtgtggaagaagatttgtagaatgacgaaagcggaaatacaacaagtaaagttacgattcggcatcattggcaacaatgaaacattgatgcgtgcgatagacgttgctatacaggtggcgcctaccgatctgtctgtactgataaccggagaaagtggtgtgggtaaggaaagttttccccagatcattcaccagtacagtcggcgtaagcatggtcagtatattgcggtgaactgtggtgccattcccgaaggaactattgactcggaattgttcggtcatgagaaaggggctttcaccggtgccatcggtgaacggaaaggatattttggtgaggcggatggtggaacgattttcctggatgaagtgggagagttgcctttgcctacgcaagcacgcctgcttcgtgtgctggaaagcggagaattcataaaagtcggttcatctaaagtgcagaagaccaatgtacgcattgtggcagctaccaatgtaaacttgacacaggctatttccgaaggacgtttccgtgaagacttgtattaccgcctgaacactgtgcctatccagataccccctttgcgtgaacgtggagaggatgcatttctattattccgtaagtttgcttcggatttcgccgagaaatatcgtatgcctgccattcagttgacggaagatgccaagcagctattgatttcctactcgtggcccggcaacgtgcggcaattgaagaatataacggaacaggtttccatcattgaaaccaaccgtgaaatcaatgcttctatattgaaaggatatttgccggaacagaatacgatacagaggctgcctgctttattcggcgtcaaagaaaacaagagctttgagagtgaacgggaaatcttatatcaggttcttttcgatatgcgtcaggacgtgacggagctgaaaaagctggtacatgagattatgaccgaacgtggaaacactgccgcttcggctgtgcctgctgcttattatgcccaaccgcctgccgtagtgactcctgtttctccgagcgtgcctaccattattcatccttccataaagccgtcccacaacattgatgaagatatacaggacacggaagagtatgtagaagagtctctctcgctggatgaggtggagaaagaaatgatacggaaagccttggaaaagcatcatggtaaacgcaagagtgcggcaaaggatctgaatatttccgagcgtaccttatacagaaagattaaagaatatggattggattaaaaaaatagcctcgacagctttgttgttgagcatcttactggtagtaaattcgtgtagcattaagataggacttgccccgatcagttcgattgactactctaaagtaaaaactatttcgatagcggattttcaaaatcgtgcagagtatgtatatgccccgttggctactgaatttaaccagagcctgaaagacttgttcatgcgtcagacacgcttgtcattggtcaatagtaacgccgatcttgaaattgatggtgagattaccggttataatcaatataacgaagcggtggatgccagtggatattcttcaaaggtaaaagttactttgactgtgaaagttacttttgtgaataatacggatcataaggatgatttcacggatcagcaattctctgctttccaaacttatgattcttctaagctgctgaccgaagtgcaagatgaattgataagcctgatggtgaaagacataacagaacaaatctttaacgcaaccgtagctaactggtaataaaaggaatgacgcctgtacatttgcaacaatggatacagcatcccgaggcgttgaatcgggataccttgtacgaacttcgtacgctggtagcccgttatccttattttcagtccctgcgcttgctctatctcaagaacctctatgtgctgcacgatatcaacttcggtgcagaactgcgtaaagcggtattgtatgtatcagaccgccgtgtattgttttatctgattgaaggtgaccgctatgccctccatccccatgcttccgcacatattgtgggaaaggagttggaaaaggagccgagtatagaccgtactctttcgttaatagacgctttccttgccactgttccggaagaacattcacagacaacggaattggattatgcaatggattataccgcttacctgatacgggatgatgaagaaacgaacgaaacagattcctcatcaactaccccgacggaagtaccgaaattgcgtgggcaggatttgatagatggtttcattcgtcaaagcgaaacggaggaaggtatcagcctgaagttacccaaagaagacaacccgcttttattgccgttgattgaagaagaaacggatgaagcagaagaggaaaaggtggttgttgccgacgaaactccccggccggcagtagaggaaacagaacaggatgatagctgttttaccgaaactttggctaaaatctatatcaaacagcgccgatatgacaaggctcttgaaattattaaaaaattaagtttgaattatccaaaaaaaaatgcttactttgcagaccaaatcagatttttggagaaattgattattaacgctaaatcaaaataacaaaatgtacttattcttagttatcttaatggtggttgcatccttgttgatgtgcttcattgtattgattcaaaattccaaaggaggcggtttagcatccggcttttcttcttccaatcagattatgggcgtacgcaagactactgactttttggaaaaaggaacatggttcctggcaggatttatggtcgtaatgagtattgctactgcctatgttgttcccacttcttccagtaaaggcggtgatgtgatcctggaacaggcacagaaagaagagaaaaccaatccgtacaacatgcctactggtacagctgctccgcagacagaagctcccgcagctcctgccactactgctcctgccgctgaagattcagctaactaaagttatgtgcggatgaaccgcaaaaagaaataagagagaggttgacgccgaaaaggtgtcagcctcttttctttttatgccagatttaattacctttgtcgggattatgcaatctgattaataattaatctaatatagtacaatgacagaacaattaaaacttaaattgaatgactcgaaggctacccgctggggagcattggtgattgttgcctttacgatgatggcagcttactatgtaaacgatgtggtagcaccgctgaaaacgatgttggagtcggatcttgcctggacaagtagtgattttggattcttcacaggtggatacagtttcctgaatgtattcttcctgatgctgatctggggaggattaattctcgaccgttttggaatccgttttaccggtaaattgtcaaccatcctgatggtgggaggtacggcacttgagtattatgccatgacaggacttgccggtccggatgcacagatcttcggtcttaatgagattttcggttataaagcaggggtatttgtcgcatttgccggttattctattttcggtgtaggtgcggaagttgcaggtatcacagtctctaaaattatagccaaatggtttagaggtaaagaattggctacggctatgggcgtgcaggtagcattggcacgtatcggttcgcaagcaggttatgcagtggctattcctttggcgcgtgctttcggcattacaactccggtattggtaggtttgattttgctgttgggcggtttggttgctttctttatcttttcagtgatggataagaagctggacaaacagatggaagcggcagccatagcggcaggtaccgagggggaggaagagaaattctcctttaaggatgtgaagaatatcctcgttaatccgggcttttggttgatagctttgctgtgcgtattgttctactcttgtgtattccctttccagaagtttgcttccgaactgatgattatcaaatatggtatcaatgaaaacgtagcaggaacttttgccggactaccggccttgggagcactgatcctgactcctatattcggcggatttatagataagcgtggtaagtcggcttctattatgatattgggagctgccatgctgataggtgtgcattttatttatgctattcctgccattaactattggttggtagctattggtttgatgattattctgggtattgctttctctttggtgccgtctgctatgtggcctgcagttgccaagatattcccggtgagccagttgggtacagcttatgcattgatctttttcatccagaatattggtttgtgggggattcctacgctgattggtaaagtacttgatgtctattgtatcgtaggcaagaaggcagatggaacgaatctgtacgattatacgataccgatgtgcatctttaccggtattgcctgcttatctcttgtggtagcctttatgttgaagagagcagataagaggtatggctatcaactggaggaacctaatattcaaggataagtaaaaacaacttatggatatggaaacacctgaaggaaaagtcagtctgctggatgctattccggttcgttgcgaccacatcctgaccgaatgggagggagattacgctgtaatctcctatccccggttcaagtatgagtggatgcgcaggcttttactgccgaagagtatgtctcctgatattcatgtccgccttgaagaacacggcagtgctgtgtggcggctgatagatgggcggcgcacggtgcgggagattatttcactgcttgccgttcacttccaatctgatgagaattatgcttcgcgagtcacgacttatgtgatgcaactacaaaaagatggatttataaaattagggataggaaactaaacaaagaaggctgcacgattcatttaccgtgtagccttctcttatttattctactttttcagttctttaattaccgtctctgtctacttttaccaaagctcccgtattcgtatcgaataatacctttataacagaattcttgttgaatagaacgggggcgaggtattctaccacaccgaattgcgtaacgggaatttctgcattatacagttcctcattgtgatagtctaatgttacgcgtgctctgcccggtacattgtaggcaatgccatccacttgtttcttgggatcggcttcggggatattaatgcttttaagatcggctattgtaatgtagaccggttcacctgccaagtcgttgttggctacgatacccagtttcttagagaagcggaaggcaacttcatgcttcatctctttggggacgatgcgaatggtgtatatcttctcttctgtggtcactttacctgcaaacatttccgtcatggcacgttcctgtaaagtcaggttgtccagcatgagcttcagttgtgcaccgtctttgggcatattgtctgcttcaccgcgtaacagggcattcttactttcacggatactgtagatttctttggctaccaattccgccattttagccgttgagtttgacatcaggatttcttctgtgaggaagtctcggggattgacgttcggagtgttacctgtaactttgggttgaatggtcggagttgtcttacgttgtccgctgcccagcggcatgttgatggagtagacaataccatccttactcaactcgataagcggggctacggttttgtctttcatcttcacgaaatatacgttttctttatcgggtacaccgattacttctgtctgcatcttgtccagtgtccaataagtttccggttcggaagagacgttgttcagccgcagatagcgttcggcatacttggagaattctccgggagtgtaggtatgtttggtggcttgtacggtaagttcgatttccgttttcggaagtacgtaagttacgccgtaatccttgccacgtgtgacacctgccgtcacttctgtttgcgctatggcagaaacggagaacaacagggctgagagtaatactatattctttttcttcataagtcgcgttatttaaacgatttcggttaagggacaaagttaatgaagttatttttgtcaagagtagaattacggaatattaacagaatcgaccgtctaagggaggtatcggtgcttttcgcttcataagatggtatgttttatctcattagatagtatgttttgcctcgttagatagtatgttttacctcattagatagtttgttttgtctcaataggtgatgtcatttgacttgaagaagtttgtttttgctctgaaaaggtatcggatataaaaaaacagggagaagcaaatgcttttccctgttactatctgtgttcccgaatctaaatcaggattgcgatgacaaatatacgaagttaaaaaccggaagtcaagcttttacccggttattttacgaattggatgcaaacaggtttatcaatactgatgtcttgatgcgtatctgataacagacctgttacgggatctcgttggaatacctgaatgacatgactgtctcggcaggcggccaacagatatttcccgttcggagtgataataaagttacgcggatgaatccccgtcaactgatagcctacctttgccaacataccgttttccggattcacttcgaagatggcaagaccgtcacctttcaggcgattgctggcatacaggtatttcccgtcgggactgagatgtatatcggcactgccacgtgcacggagtgtgtcggctgcaatggtctgtatcttttccagtttgccatccaagtagctgaaagcggtgatattaccggataattcgctgataagatacgcgtatttgccgttcgggctgaaggtgagatgacgtggaccggagttaggatctacgtcaatggcttcggcagaagggtgggggataatgctcttcggatgtatgacaaagcgcaggatgcggtcggcactgaagtcagtggcaaagatatattttccatccggagagaagacagtgcaatgtacgtggggtgttgcctgtctttcagcgtccggtccgccggtactgccttcaaaaagcgtatcgacaggttctaatgaaccattcttgttcaacgggaagatagacatgctacctccgctatagttggctgtgagtacttcttttccattggtggcaacgtagcagggatcggctcccatagtgggctgccggttcaacaaactgagtttccctgtttccttatcgaaggagaaagcattgagagcggctgttgtgtcgttcatttcgctgacggcatagacaaatcttccatcttctgaagggatgagataagacgggttgagcacttcgatggaactgagggaggtggcaagtcccgtttcctggttgaagcggaaggtgtaaatacctttgctgtttccatcggtgtacgtacctaccagcatggcgagttcgtcatttccgttgtttacgtttcccgctttgcggggtgcgcaggctgtcattgctaatccaagcatacagaaaagaagagatttcattagtgattagtatttagttaatcgttaattttcacttccgccactcctacacggtcatcattcagcacaatgcgcaagtcgctggcagtagttcctttgaacgtatatgaaatcaactttccgtattcgctgactgtacccgaataaactgtcaggaattgtccgccaccacttgaaagctggatttcaaactccgccggcagaccgttgcctctgctgaatgcaatggaaacgccatctaccttggagccgttctccaaggcaaaggtaatataatctcctttatttccttcccaaacagtattcatttttttatcgagcacgttcattacactttccggattggtgctggcagttacgggagaatccgtttttgcctgtgcttgcatgggggcgtttggatcttctactgtcaattttccactcaggcggatgtcttcggaagaagcacctaccataatgttgaagtctcccggttccaccacccattccatgtgcttatccagtaattccagttgtttgcggtcgagggtgaaaactacctctttcgtttctcccggttgcaggtggatgcgctcaaagcctgccagattcttttcgtaagtggtaacgctgctcaggatgtcacgaacatacaactgaaccacttcatcgcctgcacgttttccggtatttgttactttacagcgcacagttgccttttggttcggtgtaatcactttcggactgatttcgatgtcggaatactcaaaggtggtgtaactcagaccgtatccgaatgaatagagtgcaccgttgacacgtgacatgtttccatccagtcccggattctttccaccgtcaatctgtgaagaaggtttgcaggggaagttaaaaggaatttgtccgacacttttcgggaaagtgactgtcagttttccacccggattataatctccgaagagcacatcggctactgctgttccacctttggaacccgggtaccatgcttctaaaatagcgggaacgaacttgtccgcccaattgatggatagcgggcgaccgttaatcagtaccagtacgacgggctttccggttgcttgtacagcttgaagcagtttcagttgtcgtcctgggagttcgagactgctgcgcgatttgttttcaccgcaggtacgctgtccgcctcctaatacgactacggctacatctgcctggcgtgcattttctactgctttatcgatttcagcttgttcgctatctgtcatcggatagtcgataagttcgctttccggccagttggcgtctacgaggtcacagcctttgctatagagcacttctgctttgccttcagctttttggcgaataccttccagcactgtggttacttctactgccaaaggaccgtagtgtgtcagtgcgtatccctcttcatccgcattggggccgcaaactgctatcttcttcacgttgttgatatccaatggcaacacgttgttttcattcttcaataagacgaggctttcgcgtgaggcttgcaatgcaagagattcattctcagctttctctacttctttatcagcccctgcaaggtcagtctgatagggagtatcgaacagccctacgaggaattttacacgcagaatgtcacgtacacggtcgttaatcacttcttcgcttagtccgccctcttttaccaattctcgcaaaggcaatacatatgagtccggtgaccggaaggtgcaacgtacattcagaccggcttctacactttgacgcacggcttctttcatgtctttggcggtgctgtgtttggtatagagatattcaacggcatcactgtccgaaaccacatatccccggaatcccatctcgccacgcaggcgtgtagtcagccaataataactgccttgtatggggacaccgtcgtaatcattgtacgagctcatcactcccaatagtcccgcttcctttatcacccgtttgaaggggtagacatgtatcatttccacttcgcgtggtgacatttgcgggtctacacgtgccataccttcgcgggcgcccttgttgttactgtaagcaacgaaatgttttccggttgctgctacctgatggttatgttgcatgccgcgtaccatttcaatacccagttcggcaacgaggtaaggagattccccatatacttcctcataacgtccccaacgctggtcacgaccgacatcgaggataggagcatagacattggtatatcccaacatacgggcttcccgtccggtgattaatcctacctgatgtatcagttcgcgattccaggtatgtcctaatcccagttgtgtggggaaattggtggcacggtaactttctactccgcggataccttcgttcgtaaagtctacggggatgccgaggcgcgtttcttctatgaagaagcgttgtacttcattcagtgcccaggcatggcgggatgccggccatacatagggattatccgatgggggaagtccccattgttggaaaccgttcaggtgttcgtcgatggcaccgatgccgtctttccaaagcatttgtttccattcgggggtggggaggtcgtcctttagtacacgtttgtaaccgtagagggttaccatctggcaagtcttttcttccagtgtcatctggctgagcagatcttcaatacgtgcatccagcgaggcattcggatcttcgtatacatccttcactccgtttttgttgaaatcaatccagcctttcttgtacatctcgcttttgacgggtttgtacacagcgggtatcttcacggtcttttgtgcgcagagcagagtactgcctccgagcagtagtgtcattgcaattagtttcttcatgatatttatatttttgtgtatattatcttctgttgccaaaggtacgggttatgtgggagaaagaaaggtaaaatcgtccgaagtactggcttttattgtacgtatggtaatgcaaaactgctttgggtcttataaaaagataaggtttattaatccggagtaagcaatcacactattcttttgtacagtaaaaaaagaattcttatctttgccccacgatttctaaaaaccgtatgtattctggggttgactggatttgacagcgggtagaaatagtaagtaagcatgcagtgcgtcgttgatttgcactttaatctcagtcctcaaaattttatctggcgaaagacaatacgctcttgctgcttaatcgaatcacagtagattagcttaatcccggcactaggtgctgggacgagacatcactcggaagctgttgctccgaagcattccgatccagtggtgcagttacatcggggatagttcttgtcggccttgaggcgagaatgaaactttaaaggataaggcaatggttgatggctttggttctgccgttgctcgaaaacttaggcaaagataagcatgtagaaagcttatgatttcctcgtttggacgagggttcgattccctccagctccaccaaaagaaagaaagctctgattatttcagagctttctttctttttattcagcttcttgtcttccgaacatggttcatccgggcttacccgtagaatcatgtagttttgctctttcctttcttatctataaacttccttcaatagattcagtagcaactgttgtcctaccacattagcccggttttcacttttcgtattgaatgtattcatagattcattcataccatccaaatcgacaggtgcggtatactccttgattcctttgatacaggcagggatatccagcgtagtgataattacttttccacttcctgccggtatcacctgtaaggctgaatatacctctttcttatggtcggaaacacagcctacaagtgtctcaccattgaaacaccgtaaaccgatacgacgccggttgtacgtggcaaagcattgatattcccagttgaaagcactatttgccggcaggttcataaagataggatgctcccggttgaagaaattacctccataccatgatttacccagaatcttcgaaccacgatagtccagtacctctttatctgccaagaattctgcccaacgttccggattgtctacaataatcagagtatgtcctttatatacccattccatgatgtcgctcatgccactgccccattgcgtaggttcataagcgccgaccagcagataatctccttcaggggtgccacctttgtaaaccggaacctccatgccgacaccacgtaaaaagtttaccagagctcccgtcgtatcggctacactgccccgtgttgtgatgcctttcgtattcagttcaaccgcaaacaacagatcgtctccctttaccaattctgttttacctttcagtaaggaagcctctatacgggtataacctttactcttcggtataaatgcccaaccgctttgcaggcattgaccgtagtcgtttccacctttcactgtcacccgttctttatgactggccactacgtttccactctcatctttggctaccagattcagtatataagaacctttcagattcttttcgttcacaatgtaagtgtccaccaacgttgtatctcctgtactcactaccttgcggttcattttgacagccagataaagaggggcattgtagcgggccatgacttccggatctcctttcgggaaacggtaattgtcgacgatgcccgaatgattctcaagcttcatactttcccaaccatttacggcatacgcatctactgtattactgatccggatattctctatgatccttccctgataatagaaagaaacatttcccatagaacgcgtcaggtcatccaccgtggggaaggctttgtcaaatcctttctctttcagaaaacggtcgtaggcgtcataccattgcagataatcgtccgcttcccaactattcatcttgccgcttttcaggatatcttcacggatgagttgcaggcgtggaggagtaccgatagccccgtcttcaccccagtatacaatttctttcttatgatcggagaaacggtgatagttatctttacccagatataagttgtcatgataacatccgggaccacctgcatgatgccggtcataccatccatagtcgtagaaggtagtgtcataaggcatcagatgcaatttgaaacgcgtattgtgttcctccgccggattttctccgttgcttgaattataagtcaggatgcgggtagggtccaaagcatgtgccatgcgcatctggtcataatcttgagtctggggataagcgccacgttcattatgcagattgtagatgatgagtgacggatggttacggtcccgctttaccatgcgtgccagtttctcgttgcggtaggcaaaatagaaattactttgcttgtcgttgtcattgaagtttttgatggggtactgattacctccgggttcttcaaaatagagtaatcccaattcatcagcatagtccagaatgttggtttgcccgatattccggtgaaagttcagcatgtttaatcccagttctttggcaatcgtaatttgccgtttggccagttcatcggaaggagtaataccattataaggccagaatccccatgagatagctgtccgtaatacgattcgtttgccgttcaggaagaattgccggtctccttttacgtcttttatttcgaaccagcggaaaccgaaacgctcagttacggcatcgtcgttcagagaaattttcaggtcatagagacgaggcgagtctacgctccataagtgcgcattgggcactttgatttggtaagtttgcaggttctcaccttctttcagcgattccaggcggacattcttgcggtatacggtctgtccgttgggatgttccttgatttccaggcataattccttgtttgtgacagaagttccggtttcattggctgccctgacttctacttcaatggtatgcggttccggttggtttttgatgaatacatctttcacataaagctttccggtagcttccagttccacttttcccgtaataccaccgaagccgtgtgagggattggtgcgatataccccccaggtataaacctgtgaatctttccaattgaagttcccgttaggatctgtaattcggaaagtgattacattcttcttgcccggttctataaaaggagtgatgtcgatggagaaaggagtactgttcactaaatcatatcctgccagttgatggttgacaaatatttcagcacggaacctcacggagccgatattcattgcaatacgtctgtttttccattcggcaggaatgtctacttcagtttcaaaccaggaaactcccgtatagtttcctgtcactccgaatgtctgtccgttccatccccacaggtgctcttctactgtggcaggcagattgatacctgttttctcgggatgtttcagtaattgccagccccctgtcggagtgtttacaggcaatgctttgatatctatcggcggaagatataactcatcattctgccagacggctgcacggtctaaggtgatgctccacggttgagaggacaagtcgaggtttactctttcctgagaggagccgatgaaaatattcagtacgacacctgttattagtagtagaaacttctgattcatactttatatattagcttctgattgatgtttttttatggaggattatttcaaataactgaaaggttgccatcctttcaatacaaacgccggattcatgtaatccgcaatgagcgctgcgtctttttgcgcatccagttggcgtgaataggcatggcgttgtgatacatccaccggtttgcctgtttccatatcgcaagtgttgaactcatacatccgggaacttttctcaccaatagcactccatccttgtgggataatgtttttcaccttacagttgattaccacaaactctgcgtccgggtaagcggttccgtgattgctttttgtacgtccgtagtcggctttctttccgtcgggggcggcaaaggtacattctacaaagacatcaccatgatttcccgtagtgtttcttacccaggagaatgggcctccgtcgttgcggaagttactgcggtaggcaaacagactgccacgtcccaagatggtgtcaccacctccgtccagttcacacgactccatatagattgttccgtttgcttgcaatgcatctccggaaccgatgatatgtacactgtagagggcaatacgttcaccgttcagcagcaaaccttcagcttgtccatgcaggtcggtagctatggtcaggtcttccagtaggatgtcgctgcaattatccagcatgaaagcggctcttctggacgggaatgtgcccggccattcgttggttttcactgtcaggggatgaggattgaaaacttcgttgttagcatagtgtacccgggtacggtccattcctgcacctttaatctttacatttgttttgttccgggcatataccagttcttcgtagtcgccggcttgtatcaggattacggtttgtttctgactgaaatcgggaataaagtcgagtgctccctgcacggtgttgaaatcaccttgtccggttgcatctacaatcagtgtgtctgtagaagcgggagcggattctttggttttgaagctccagttatgctctttgctgataccgtggaaactgtggtcgggtaaagtcagaacaccttcgtctatggtgacataataactatggttatagtcgagcatattgttgtgcagatagatggttgccgtcgaatcgcgcacgatgatgggatggaaatgaaacgcatctgtaaatccaccgatgatgttcagctggtaatcgggtggggtaggttctgccgtacctgagggggtgccggggcgagtatccctgttagtaggcatatgggtacgtgtatagtcgtaaggtattttggtgtaatcacattccggtccatacgtgcggctttcggtaggtccggacggaatactcagatccagactgtccactatctggtgcgacatcgcatcataaatgcgtatcattccggagtcacctactatggggctatccgtgaaagttagtaccagatgggtatccggatttacattctcagcaccggcagccggaaacagttcggcgtttggtgattcaggttggttgcaggccgacagaaaaggcaatacagccagcataacaaacaaaggtttcatcattgttatctcttaatttagtagttctttgggaaattatatagggtgcaaatataggccatcctcccaatttcgttttataatatctgtgcgattcattacaatttcagttcatcaggatgttttttcagtttatattctttgggagtacaattcatggtctctttaaacactttgctgaaatactggggagttgcaaatccactcatatatcccacttcagaaacagtatattgatcttgttccaataactgaacggcccgttttatgcgcatacttttcatgaagtccacaggtgaaactcccatcagggatttcatcttccggtaaaatactgtacggctcattcccatagcttcagccaggtcgtctatcttaaagtcaggattgtgaatgttttcttctacactctgaagtatattccggataaagtcatcatcaaaatgagtcacctggggagtggcagattctatctggtctgttatattcgttattttttctctctttattttagaggtgtaataatcatatagcatttgccgctgtttgaacagggagtctactttcgctttcagataagtggaactgaaaggtttggtaatatattcgtccgcaccatactccaatccctgaatctgatcgctcaatgaagacttggctgataatagaataacggggatatgacagatattgctgtttgcttttactcttttcaggaactctattccatccatttcgggcatcataatatcactgatgacgatatccggcatttcagccagggctttatctaatccttgctttccattttccgcttcaaaaaccacataatctttgcttagcacattgcatataaaatgacgtagttcttcattatcttcaataatcagaatccgggtttctttattttcatcttctatgagcttcccctcattctctctctgcaattcagaattctcactgtcattcaggatgaattctacattgctgtctgcactgaaggtctcatagcttcctggtaacctgaccgaaaaggtactgccttcgcctaatttactatctacttttatggtgccatgcagtaagttcagcaattcttttaccagagacagaccgatgcctgtcgagaggttcggatcagcctcgtctaaagtctcaaaacgagtgaacagttgattgatcttttgggcattgataccacgtccttcatcttttacctgtaagtacagatgatccttttcgccggttacggataaaattatccttttctcattggatgtatatttgaatgcattggataacagattaaagagaatcttctccagtttatccacatctgtgtacatcacaaaagagttgaagttgcagttcaactggaattctatatgtcgtttgtgagccatggaagtgaaattctcatagattttcattatcaaaggaatcacatccaactgttctaccatcactttcatcttatcattctgtatcttacgaaaatccagtatctgattgattagccgtagcattctgtctgtatttcgtttggcaacctgcatattctccaggcctgcgtcagatagtttctcattactgatgacttcatctatcggactggctatcagtgtaagtggagtgcgaagctcatgagaaatatcagtgaaaaaacgtagcttcagattggaaagctgttgctcgaaatctactctgcgctgcaaattagtgatgcggattacgatatatattacgatgagcaatgcagcaatacctatgacaatatagagcaatatcgcccaggttgtttcaaaaaaggtcggttcgatatgtataggtaaagaagttgcgttatctacccataccccatctccgttagtcgattttacctgaaacagataatcgcctgccggtatgtttgccagactggctgaatgactgtttcccaattcaatccactggtcattcaacccctgaatgcggtatgcatattttatggccggagagtttacgtaatccagagcggcgaatgtaatggtgaagtttcgttcgtctgcctttaaggattgtatttctgtactattgaacacttcttgccggcgggatgtattattaagataaatatccaaatgcgagaatacgatgggaggtacaaaatcgctcttatataagtctttgggggtaacacataatgctccgaattccgaaccgaatattaacttcccggaagaacacaaaacgggctttgtctcagccatttgtatctgatcgttgtactcttccaacagattcatatcggcatccaattttgataatttattctctgaagcaatccatagattgccttcggagtcttcgattgctgaaagggataaatcgggtacttgcccattcgtcgcgttataatgtttgaaagtcagcttttcggatagcctgctactgtcatccaacagattaattcctccgctcagtgttatgaccaataatttgccattatgggtttgggtaatattcagtacgtcattgttactcaaactggaataacgttcctcacaaacgttatggtaaaaacggatggcttccggtcttgcaaaatcagaggagcaagagagtagtcctcctgtggttccaatcaggataactccattatctgcctcgtacaggcaacgtactttctcacatacatgaatcgggtagttattgagaatatttccggagtgaatgaaacgcagaccggcactttccggtaaatgctctatcaggttgaggcctcctccaaaagttcctatccatatacgtcctgctgagtcttgcaaaatggagtagatggaattggaagatatactatacggattgtttttatccgataggtgatgggtaatccggtaactgttgtctctttcgggatgcaatagataaagtccgttgtctttggttcccaaccagatgttatgttctttatcttcgtagatgcaatatacatctatattgaaggtaacggtaggatcaggtactattttgccttcccttgaaagatttccaatccattgtccggacggatcgtagagacatacgttgctcgattgctttttgtgattacgcttccatcccacccacaagcgcttctgatgatcttccatcaaagcacgtgcttctttatggttatcgaatctatattcgaatttcttccggtggaatgataggtatccaaaaccatctcctttggtataccacagattctgatgacggtcgataatataactgaaggcctggaatgaaacaggcttccgcattcccatttcataagtagatgcctgctctaagcaacggtttaccggattgtaaaagcataactcacctcctgcgggtttgagccagatacaaccatattcgtcttcatgcacaaaagtacaaggtttatagaaagggacttccgggtatctgggataattcaataaggtggtgtttttatttttccttatctaataggattactccatcgttgacgcccaatagccatagatttcctttcttgtcttcaaatacgtctgaatctatttctatgggcatttcatggactgtgaatttttcatttgccggatcgtaaagtataatgctcctattttgtagaattacaattttattatccgctaaactttttaatcctgtgatctctgatatcggttgttcgggaacacatggcaatacatcctggctttgagtatcataccgggtgaagaagcctttggaagtggccaggtaaattccaccgggaatttccaccataaattcgaaaggcattagattagatatgcttttctgacctacaataagagcgcctttgttagtcagaatccattcatctccatctttatcttgggtaatgccataaatggtatctctttcatttcttccggaatataactcgacggactctgtcgccggaaacttattttcatctatgcgatacagctcattctgcataccgacggcccaggtaatcccttttcccagtgcatacaatttgctaactgaattggtgaggcttttgttaaaaaggaaagggtcctggtattcgtatgtccgggtgttgaataagtaacagcgtttatcataagtcaggcaccagatgttattcaatgaactctttttaattttggtaaagcgatgattgcttatgcggataggactttccgggtaagttttataattatagaatgagtatccgtcgaaacgttccagtccgttccaggtggacatccatatataaccattatcatcctggataaaattatggacgtttttctgagataatccgtcttgtactgaatagtgcttcatattgatcagactttgtccgaacaacataggggtgaataaatagagtagtatggtgatgaccggctttagcatagtatctgtatttttctgtcatacaaatatcgggaaaagttatcagataccaataaactgatgaattattgcaatgattagacctgaaattataaaaagcgtaccctatgttcagaatttgtaaaggaaaagctgaatattataattcgatgttttatgaaatgtcttcttttgcaaagaattatctaacaaaataaaaacagggatcatgaaacagatttttattttcagaaagacgtatgctgccgttattctgataggttatctgatggcattctcttcggcaatggcacagcaaatgccgcgacgcaatgctttacgcgaaacaaacaatgaattttttaagactgaagaagcgcgtcgcataggcaatcaggtgctggcgtttcagcgttgtaccggtggttggccgaagaatatcgatatgactcaaaagatgagtaatgaggaattagcacaagtcttaaaggagaagtcacgccgtaacgattcgacaattgataatggcgcgaccaccatgcagatgatttatctggctcgtttatacaggcagacaaacgatgtgcgctaccgtgacgctttccgtctggcggtggagtatcttttgaacggtcagtatgagaatggcggatggccgcaattctggccggaaatgcgcggatatcaggtacatattacttttaatgatgatgcgatagttaatacactggaaatactgcatgacattatgactgctgaatttccttatgacggtgacctcaccgacaaggcaatgcgtcaacggctgtcgaaagcttttgataagggaattgaatgtattctggcaacacagatcgtaactgatggacagcttacggtatggtgtcagcaacacgaccgggaaaccttgaaaccggcttcggcacgtgcctatgagttgccctcgtattgctcggcagagagtgctgccatcgtgagtttacttatgacgttgcctaaacctgatgcacgtattaaacgggctgtccacggagctatgaaatggtttgatacgtataaactcactggtttgcggtgtgaacggtcggcaggagagcatggtgtacgtgatacccgccttgtagaagatccgcaggccgggccgatatgggcacgttattatgatttgaagtattgcgaaccttatgtttgcgaccgtgatggtttgccacgacgtcgattggaggaaatcggagtggaacgtcgcaatggttacagctggtataacagtcgcccggccgagcttttcgaacagtatgatatctgggcagctaagtatgatccgaagcacaaggtaaatgttagtctgaattcccaaggggctaatgaaaggggaattattgaaatgtatcgtcgtccggtgatggaccgcacagctttcgatgtggtggtgaagccgggacaaagtattcaggatgccattgagaaagcacctgagacaccgacaaatcctttcaagattcttatattaaaaggtaactataatcaaaaggttatcatagaccgtccgaacattgtattggtaggtgagagccgtgacagtacagtgattgttttagccgagactgctaagacaaggaccatcactcaatatcatggaaaacctgtgggcaatggtgtgattgtgttgcaagagggggctgacgattgtgtcattagcggtctgacagtatataacaattatggaactactgttgagaacactaccacccaccagatgtctatctttggacgtgctacacgtaccattgttattaattgcaatgtatgggctgatggtaatgatgcactttcactttgggcgccggcaggcaatggaatgtattatcatgccgatctttatctgcgttgtcccggagtggattttctttgcccgcgcgggtggtgttatgctacccgctgtcggttttatggcgatggccgtgcactgatctggcatgacggtcggggtgataagagtaagaaactggttatcactaattcgtcttttgatgctcaatcaccaactattctcggtcgttggcatcatgactctcagttctttattatcaattgtcagatgtcggaacagattctggactgcaatattggttatgcttattcggacaaagtgctcgatccttgtccgtggggacagcgtgtttattactatggctgtcgtcgtcagggaggccatagcggttggttggacaataatctgcaacaggcggagggtgcaccggcattttatggcatcactgcccaatggacgtttggcgggaagtgggatccggaacggagaattcgtgatctttggaatgttttggcttattgacgaaataaccctgttgataagaggaaaggcgtggtcgtaagattacgccttttcttatggttggagagggggatactgatgctttgtcgtgcctctgtttgctccatttagtttctgccttttggaacaaaagtaccttgcctgtggaacagaagtttctcaagtaagaaataaaagtgtcttacctaagaaataaatgtcccacaataaggaaacaaatgttcctataaagtgaaacgggtgctttctcgtaacgggagagaaatgagccaaatggtcaagtaatattatcttaattctcctcctcctgggaggaggagtacccgaagggggaggtggtaggtgagaaaagaattccttatttatatggttcataggtattttttgctttacctaccaccccgccctttgggcacccctcctccgacggatgaggggaattgagatactctatttactcaatatcgagataccaatttagctcataaccgtataaaaagaaattatgcctatatgttttgctataggacaatcaatagaattgaaactttgtaatctctgtttacgtaaaggtttacgtacctttttgctttctttccttttccttttacatgcaattctcctacttttgaccacataaatctgtttaaaaccaattctaatattatatttatggaaagaagcctctttaaatttgctctactgggagtcatgttcttgatcagtcattcctctttttcacaaataacggaacgggaacgtcctgcggagtggaaacaattagtgaaaggcgcccgctttatggatcgcttcctgccgatgaagggaaatgtactttcctccgatacatggggtgctgactgtgtgcttccacgttatgtagataatggcattgaagacggtatctggtcctattggggtggaaatatccgaaaaggcgaagatggtaaatatcatctatttgtctgtggctggctggaatgttcacctaaaggacacatggaatggcctaactcatacgtatttcataccgtaagcgataatctgacagggcctttcaagcctgttcgtatcataggtaaaggacataatcctgaaatgttccgtgctaaagatggccggtatgttgtctatgtgattgatggacgttatgtatccgatgatctgaatggaaaatgggaatatggaaagtttgatttcaatgcacgcgaccgccgtattatcgaaggcctgtctaatctttcatttgcccagcgtgaagacagctcttatgtgatggtctgtcgtagtggtggtatctgggttagcagagatggattatcggaatacaatcaactgaccgacaaacgggtttatccggatgtggacggtcggtttgaagatccggtaatctggcgcgatcatattcaatatcatctgattgttaatgattggctgggacgtattgctttctatcttcgttcaaaggatggagtgaactgggtggtcgatccgggtgaagcttatatgccgggaattgctgtacatgcagacggacaagcggaagactggttcaaatatgaacgccttaaagtatatcaggataaatacggacgtgccattcaggctaatttcgcggtaatcgatacgcttaaaaacgaagataaaccttttgatcaccatagctcaaagaatattagtattcccttgaatccgggattgttgcttaccatactggacgagaaacctatcacctcgggtacaaaaacaattcgtgtgaagatacaagcggaagaaggcttcaatccccagacagatatagatgtgaattccttgcgcttcggtgcttctgaagaagtgaattatggcagaggctgtcaggtattgactacagaaaatgcgggtaaggatttgattgtaactttcaatggcaaaggaaatggtatcactaaagatgaatttgccccgaagttgattggaaaatacaaaaatggaagaatgctttacgggtatgcacgtttgccatacattgattatatagaaccgatcctttcagctcgtgccccagtctttaccaaatccggaaagggactggagtgtacagtggaagtacagaatttcggtcaggtaagctcgaagaaagcattggtggaagtagggtacaaaaaggaagggaaaacaataaaagtagcttccggtatggttccggcattgaagccttatgaaaaaacagatctattgctttctgctaaggataggtttgaggaaggaaaggaatatgatttgatagtgacactctattccggcaaaaaagtattgtcaacatttaatctgaaaaagaaagtattggagtaatttgagaaagctatctattccaatgatttgatagggggataaatattccgcttacaaggtattaacttcctgtcgacaaggtctcaacttcttgtcaacaggaagttaactttttgtatgcaaggagttgagatcttgtaatatgttgataaatagattcttcctgttttgctcaatcctgatataaaagattctgttcgtaagcggatgattgaaattataccgtcaatatctttcggaaactttcattaaattcctatctttgcgaaaacccgtattacttgaatgaggtgaaatgataatcgatgttacttcattatgtaattgatttctataaagagtcaacaataacaggcgggtagtcgttattaggttatagttaaatttcattttatgaaacatttcgttctttttgcctgcgtggctgttggtttgatttttgccggatgtcgtaaccggcaggaaccacctgtgccggtagttgtgcaggaggctgaacctaaggatacggctgtgctggaatttcctcatcctaaagaaaaacagttgaccgctgccgatatttctcttaccaaagaattgctctatgaccagcataccctcgaagatacctatccatataaggatacggtacgctctttcaaatgggatgtcatccggaactgtctggcctatattgagaatatgcagcgtgatactactgcaaggtgggtggtgttgcagaattataagaatctgaataaagaagctcccctggtacgtaagttcgtgcggaatgtgtaccgccgtgtatctgatacattgggcgtggagcgctatcaatcggtgccgctgtatctgcccgctgatacgttggtacccgaacgttatggtagagatggtactatcgcttatctgaaaggcgaggaaggaagtttttaccggatattacccgccacttttgaagaagaatggctggcgccacgcagttatctgaaacaattgccggatagcaccgtctttaatcatgtgatttttgtcgaccgcctggatcagaatattactaccttggaacatgtctcggaaggtgagtggaagatacgcagcatgaatcctgccactaccggaatgcatgctccaccttatgctcaggaaaccccattgggaatgtatctgcttcaacagaagaaaacgcgtatggtgttcctgaaagacggttcggcggagacaggaggctatgccccctatgccagtcgttttacgaacggagcttatattcacggagtgccggtgaatgcaccgcgtacaagtatgattgagtatagctggtcgttagggactactccacgttcgcatatgtgtgtacgcaatgccacttcacattccaagttcgttttcgattgggcacctaccgaacgctctttggttgtggtgattgaatagtgaatcctcatttttaacgatctgtgtgataggtgtctggagaaaaaaatgtaatttagccgccgttatttctctggctaaagttttatgttgcgatttattgtattcattttattcttatttcttccttgtaccttattttggggcggcaagtcggcagatagcactcctgattctgctgaaagggctgctgcatctgatgttgaggcttatgcgagcttataccgttccatgcagttggaaggagtcgttaactggaaagctttccggcaggctgtagcaggttattataaaatagacaatcgcaaacgggaggtgttgacattgatagacttttcccgtccttctactgcaaaacgtctttttgtatttgatatgagggagcgtaaagttcttttttcatcggttgtttcccatggaaagaatagcggtgataattatgccacttccttctccaacgaatatggttcctacaaaagttcactggggttctatcttacagaatctacttatcagggaaagaatgggtattcgcttattttgaatggtttggaaaaaggaatcaacgaccgggctcgtgagcgtgccattgtgatgcatggggcggcttatgccgatccttcggtagtcagccgaggaggacgtttgggaagaagctttggttgtccggctgttccgcaaaaactttcccgtcctatcattgatgccatcaaaggaggaagtgtgatgtatatctatgctgaaactcccgaatacctggcacatagttcagtcttgaaaggtgcggacggactgtagtttaattcttttcatggcgaagcatatttttgatgtttgtcaattcctttaatcttatctttttctacctttgcgtacaattttcagaggattaatttatggcaacatcaagagaaatgacggcaggacgcgcattgccgttgatattcaatttcactatgcctctgttgatgggaaacctgctacaacagacatactctctggtcgacgcggcaatcgtaggaaaattcttgggcattaatgcactggcctcggttggagcaagtacttcggtagttttccttattcttggtttctgcaatggatgttgtggaggtttcggtattcctgtggcacagaaattcggagcgcgggattatagcacgatgcgtcgttatatatcggtcagtttgcaactggcggcggtgatgtcggtggtgattgcggtggttacgagtattctgtgtggggatatcctgctgatgatgcgtacaccggatatcatattccaggatgcttactattatttattgataacgtttatcggagttccctgtactttcttttataatttgttgtccagcatcattcgtgctttgggcgatagtaagacgcctttctggtttctgctgttctctgctgtgcttaatattttgcttgatttgttctgtatcctggtgctggattggggagtggcgggagctgccatcgctacggtcttttcacaaggtgtgtcggctgtgttgtgttatggatacatgatgcgccgttttgatatattgcggggaacaccggatgaacggaagttcaatggtgctctggcacggagattgatgtatatcggtgtacctatgggattgcaattttcgattaccgctatcggaagcatcatgttgcaaagcgctaacaatgcattgggaactgcttgtgtagcagcttttacggctgccatgcgcatcaagatgttctttatgtgtccgcttgaaagtctgggcattgctatggctacttatactggacagaattatggtgcgggcaagcccgaacgcatttggatgggagtaaaggtaagtgcgttaatgatgattatttactgggcatttacgttctgcgtattgatactgggggcacgtacgtttgccttgctttttgtggaagcgtctgaactggaaatattgaaggacacggagttgttcctgcatatttccgtgtccttcttcccggttttgggattgctctgtattctgcgatataccatccagggagcgggatataccaatcttgctatgctttccggagtttccgaaatgatagcacgtgtgctggtcagtctttatgcagtgcccgctttcggctatcttgcggtctgcttcggtgatccgacggcatggattgcagctgtcctgttcctagtgccggcatttatttttgtatatcggaggttgctccggatgaggagagaacagtgagtataattcccgtacctcctcccggtgcctgtgctatttgcagggtcgattcaccggttacttcctgttcttctattatcactgggtatgggttggtacgataatcagccttatctccatctctgtagataacagccttatatcgctttcctttatccagaaaggagaggggaagttgcatctcccgaggttgttcattagtgatgcttcctataaaccaacgtccgctgcttccgcgttctttacgggcaattgtcacatattcgcctatttttgcctcgggtactatggtttgctcccaagtagtagggcaggtggtgataaatgaaaacggttcagggttccgttcatagttttctatttcatcggaggccatttgcaggggactgtataagacaacggataaagccaattgtttggcaagcgttgtttgtacacgcgtctgaggcaacaccggattttcgaagcggaaagtgccgggggtgaaatccatgggacctgccagcccacgggtgaagggaatgatggtagtgtgtacgggaggattgccgccatctttgtcccaagcatcccattcctggcctcgtacaccttcttgtgtcatcagattggggaaggtgcgttgcagtccggtgggcatcacgggttcgtgattgtcaatcataatatgcttgtcggctgccagttcaataactttccggtagtgacgtacaccaaactggctgctgtgtcgctctttgccatccagcagtttgcctacatagcctgttttgactatttgcacgccgtgatctttatataaattgaaggctgcttctagttggttttcataatcagatacccagccgtccgtttcatgatggccgataagcgtcacgcctttggaagcggcatagtcggtgatctgtttcaggtcaaagtcaggataaggttcggtaaagttgaaatgataagtatcccaacctttgttccaaccttcaataagtactccctgaaaaccgtgtcgggcggcaaagtctatatgccgcagtgcattggcagtggtagcgccgtggcgtgggcctgtgtgccaggtgtgtttatgcatgtggtaagtccaccagattccaatgtatcttccgggttgtatccaggatgtatcctgaatgcggcaaggctcgttcagattcagcataaggcgtgacaggagtaaatcacctgcgctttcagcaacaatcatcgtgcgccaaggagtgacaccgggagctttcataaatactttttctcccgtagaccatggagtgagattggctttcagggtcatactaccttctttagggataagattcatggctgcataatctgtcagattggcttcatggatgctcaggaaaagtccgtcattggtttccatagtgagcggtgtgcttacccaaccgagtttactgacaggagatgcctcgtagagtgcttcataaaaatgtgcttcgtaaggtatggaccaggctttatgatcaccggtcaatgcaaactctgtaagttcatccatgatcacaaagtcttttaatgcttcctgttccggaaattcgtagcggaagccgaacccgtcattgaacagccggaacacaacattgaattttcgtttgggggtggatgttttctgtacgcgaatggtcatctcatgatagttgttttccacaatccggtcttctccccagatttgttcccatgtcccgctgaatgaatggtgaagagcttcagttatttccagatggccagcaagtgtatcttctttcaggataaacccgaggcgtgacttatcgagtatgggctttccatttcgtgagagttcataatagagttttccgttttctgtttctacatgcaggcagagattaccatcgggagaacttacagagagttgcgatgccggattgcaacctgtgcagaggaaaacgataaagcttacccataacagagaataattaggaagtcttttcatgatttctttcttatttttatatagtccagttcaaagcatccgcctttggacgtactgttctgaatgattatataattaataccgttttgcagggatatttctgtctccgcagtttgccaggctgttttgtcagcctgtacaggaagttgcaacaatttctctatcgccacatcattgacgataatcaaagccgctgcgtctgcagctcctgtatttcgatatctgatttccagcggatagtcccctgtttggggaacttccactgtaaagagtacattggcgccggagttttcaagtcctgtgacgtagccggcaccactgtaagtattctcttgtttgccatcgttatcctgtccggaatcggattccttgcaggataacaggagacaagccattagtaatagattgtagtacttcattgttgattgaattctgtaaatgataatttagcgaagcgaagcttcgcagttgacaaggtaatcagttgacaaggggacaaggggctgcgcagtgttaggctgcgctgtaaaatgataatttaggagtgtagttattgatattctgactatctcaattccccttctccagttggaggaggggtgcccaacgggcggggtggtaggtgagagaaaaattcctttatcttattatgaataggtattttattgttttacctaccacctccccctacgggtactccaccccctctgactcccccgttatcgggggagagcaattcccgagaggaggagaatttaagatacttcgcgtaacaataattatcatttcaccgcgcagcctaacactgcgcagccccttgtccccttgtcaacttgttcccttgtcccctaaattataatttacttgattgattttgctccaccccttacggaagctgtttctgcttctattttcagggtgttgtgttgaatacggattactttacattcatggggtcgcaattctacagtgtatgttcccgacatacctcccaagtctttgcgttcccataaatcccgtacattgacggcttgcccgtcttcaatgcccagttcacgacggaagtcaatgctgcgtgtctgtggagtactttcacggttgaataatcctaccacccaatctccgttaggcaactggccgatccatcgggaactgtttgctgcatcccgaaagtcgtaactcaatggtttggcggcaaaaccgagactgttcaactcgttcatttccggattctggtaaacccaggcgtgatctccaatcgtatcatactggtcggcaatggcaagtgcagaacctcccataatcatcagcgagaaaagaaagcggcgttcgttgtcatttgccagtttattcatacgcataaagtcaccgtccagtatcatttgccctcgtgcaccgacatcggcaaaaccaatgaatccatcgaaagcattaccgaattgcggccaatggtctttctgctgcccgcggcggcggttgctgacaaagtcccagtcaccgtcgaagcagtcatcgtcaatgcgtatcatatccccgtatttcaattccgtcttggcatgattataacaatgaggcatcacaagactgaggaaaagatcatctccggcagcttcggcaatccatgccaatgcttgttcgtagcggcgggtgccatagttggtttcatagttttccaggaaatctatgcgaagataggcgacacccatttccttgaaatagcggacataattctgaatccattctttggctcccggtttatccacatccacccaatacagaggatcgttgaacgatttgtatcccacaatgtctcgggtatggtaagaagttccttttacaggcagattttgttcataggcggcacgggtcagccacatggggttgtaatagactcccatcttcataccccgttcttgcaggtatttagtccagtagctgaaaccgtttttccagtcactgttgtacttggtgatatagccgttctcattgacggtttgtgcagtttctatccatccgtcgttgcagatcatgtcgtaaccgtagggtttgaaagtcttctccatccagtcgatgtttgctttccagcgctcctcactgagaggaacgttggttacaaaacactcttcgtaggcaatccagtatctgggtcccgtaccgtgacgggtgaagggactgtcacgggctatggaagactggggacaggatgataagaataaggctgcaaaacctaatagtaacttcaaatggttcataatggtaaagtttgggggttaattcactttttctactttcagtttcagagtttgggtatttacggttaacttgtatttgccgtccgttccttcgggaataccccagaagtggtcgcgcaggttgccttccatttctgaacatttaaacatggggtattcaccgggtgtcacaatcttgacgtttccgttatggtctacactttcaggcaccagataattaaccttatcccaatctcccttttcaaggcagaatttgaattgcttgttttcgtcactgtagatcaggtttacttctgccgtatagattccttcttcatccggatcgggtgttagtccggtcggattgccggagtcccatccgaatgcacttcctaaaccataaattgtctttatctccggttccggttcttctgtttcatcgctgatcttttcgagggttagtttcagcttctttacgttcactgtaatccgataggtgccatcgcttccttcgggtattccccagaagtggtcgcgcaggtcgcctgtcatttcggagcacatcagcatatcgtattctccgggagtgatgactttcacggcagtaccatcatctgttgtggtaggtaccagataacgtactttgtcccagtctcccttttcgaggatgaatttgaattgcttgttctcttcggagtatttgatgactttatctatggtgaacgtattctgctcaatcaacttcagttctgtggggacattggaatcccaactgaatatagtgccgagtccgtacagttgcgtgtagttttcaacgggttccactacaacaatttctttatctttctcgcatcctgccagtagggggaggagggcaaagatgaatataagcttattgattattttcttcatggttatctgattttaaattgtaagttgttatatccgagagcctttcatcggcatttgagttccctttgaggaaacagtttgtttcccggtgtgaaactggtagtttcaaggcatgaaactcctggtttcaagcaatgaaactgttggtttctcggtatgaaactgagagtttcaaatgatgaaactattgttcacctaaggggatgttttttaccggttcgtattaattatatcccgggttctgtttcagtgtatgatccgctcccatcatatcccgtgggatagggaagatatcccagtgtgagtctgcatcgggcttcttgtcccaccattcttccgtacagtacaatccccagcggataagatcagtccggcggcgtccttcggcaaggaattcacgtccccattcatcgtaaagctcatcttgcgtcagggttactgtaccttcgggtttgtacaggtattctgcccatgtatcttgcggatagttacgtttgcgtaccgcattcagcagttttgcagccccgtccacatcgtttgctttgaacttacattccgccagtgagtaatagatttccgccagacgaatttcattgtaatcggcttcgcgtttacccgcgtcttcgtcactgtagatgggatacttcacaaaatgccatccggagttatggtcgccggtattcatgtttgaagtgcggtcggcgggaagttgatccggagcgagttcgtgaaatactcctacctggtcgcggatgtagatctcatatcctcctacgggggaagttactttcttttcggtgccgtcatcggcgatataaggcaggtagccataaaggaacataccttcacgggtactgttgcccaggttcttatacatggtcaggcgataatctttcggatatttcttgaatttgctgacaaatttaccgagtttgaagttgtattcattattattcaggtcgagactgggttgcaaggcatatttggtattgaagtctccttgtttgaaagcaccgaagtagaaacgcgcattgacagggacggcccaccagtatgtatcacccgaatagtgccagtaactacgcccgtaggacgacgggaaagcaaagatggtttcgttgcatttatcgtttgtccagtcgaaaacttcgtcccaggtctttcccagttcgtagaagccatagtcaccgtccagaatattttgggcataggtggcgcattccgtatatttagaagtgccgatccatttttctgcattcagatagaggcgtactaacaatgcggctgcaccggctttggtccattgtccttgtgctatcccgtttccggcattaccatttttggcaggcaatgcttcgatagatgttttcagttccgtttcgataaaactgaacagttcctgcggcgtcacttgcccgacggagttcttgctctgatccaggctgacagctaacggtacattgcggaaagcatccagcagacgaatgtagaaccatgcgcgtaatgctttgttctgcgcgatgaagttgtccatttccggctgtgacatgttgaatttggcagggtccagcttttgcaggtcatctatgacggaattggcctgcataattccggtgaaacagttttcccattcacttttgatggattcattgtcggcagcccaggtatggtagtgcagatattgccatttggcattgtcataccaccagccatcgcgtgcccaggtacccaattgatcggcacaacactcttgcaaaacctggcgcggtccgatgctgtagaatccatgttcgaaggggcggaatgtagctttgataatatcatcctttgtattgtaatagttggtagacatgatttgatcgtataccgtttccgtaaggtcggtgcatgcgctgagggagccgagaagcaatactcctgccagcgaaccggttaatatattcttgagtttcatatttctattgtttttaaggttatacatttagaagtctaattgaacaccgaacattacctgtgtagtggagggatagtatcggcgggtaccttccgtaccgttcaggttcacacccggagtcaatccgttggtctggtaagtcgaaggatctacaccattgaaacctgtaatggtggcaagattctttccggtgacgtagaggcgggcactgtccagccatttgttattgatctggaaagtgtagcttagggttaccatatcgagtttcacatagtcgccgcgttcaatgaaatagtcggtcagcacattcttacctttcttaatggccgcattcttggtatatgcttttttcagcacattgctttgcatactgggaatgccccagtagaagtcatgtacattgaagaggtcgaagccgaaagcaccacgcaggaagatggtcaatccccaattcttatacgtcaaggtattggtcatggaagctgtgaacttgggaagtccgttaccggttacccgtttgtcttcttctttggcatcagatattttaatcatctccgtattgtctttgttccatactacccagtcgccatcggcatcaataccggcatatttccaggtgtaataattacccaggcgttgtccttcttctatgcgttgcaacttgcccggttgattcggactttccatattcgccagatcgtaatagttctgtccggtgaactcgttgttggagaatttgaggaacttgttctcattggtggcgcctaccagattgacggtatagctgaaatctttcatcttcaccgcctggatattcagatcgacttcaataccggtgttgcgcatggtacctacattgacaaaagtggtagagaacaagtatggaggaacgggcacattgtagtcgcccagcaaatcttgttgcttacggttgtagtaattgaccgaaccgctcaatattcctttaaacatgctgaagtccacgccgatgttccagtttttacctttttcccatttcagccccggattaggattcttacctgcaccccatacggtgaagtactgaccgttgtagtagtaactgccgaaactgctcatggtagacaaagagaggtaattgccgaaatcctgattaccggttacaccgtagtcaccacgtattttcaggtcatcaatccatgtgatgtctttcatgaaagcttcttcgctgatacgccaaccggcagatacagcggggaaataaccccatttattgtcatctccgaagcgggaagaaccttcgtatcttaaagaagcggtcatcaggtagcggtttttgtagtcatagctcaggcggccgaagaaagcaatcagtttagaatcgcttttgttggtacccatttcgttgcgtccttcttccttggcccattcaccggaaccgaggttgttgtacagaagtccgtcggaagagaaatccttattggcggcattcagacctgaattctggaagtattgatacgagtagcctaccatggcgcgggcacggtgtcccttcaattccatagcgtagttgcccagccattcaagactatgctggcggtacttgctgtaagtgcggctggcttctcctttatagtcattcttcatagccaggcggcttgtggaaggacggaaccagtagtcgaaattatccgattgctggtcggcaaaagtcagttgcgtactgagggaatgaatggaatgaccatctttggcgagtaggggaagtaagtttagcttcacagtggcatcccagtccaatagtttggtttcaccaccgttttgttccagcttcagttcctctacaggattccataaggcttcctgcccggtgaagtcagaataaagattcggattttccggatcaaacagtggggtagtggggttggcatccatggctatcttgaatgcatcccaggaagaattttcacggtaagcgatacgcggtgcgatatttacggagaaatctaacagtccgtttttagtggtatggttgatagaggcgcgtgcaccatactcttcgcgactggaacgtatatcgataccggttgcattgcggtaatccacactgacgcggtaattactctggctggtgccaccggacaatgtgacggtatgctggtgggtgaaaccggtacgggtaatctcgtcaatccaattggtagctccacccagatcactggtcggattgttgggaacacggtattcgcggaactcttcggcagtcagttggtcgagttcatgcagaggaatactggcggtcagcataccattataggtcgcatggaatttaccgtcgcgtgatcccttcttggttgtgatgacgattacaccgttactacctcgtgtaccgtagatagcggaggctgcaccgtcttttagaatatccatggaggcgatatcgttgggattgatattcgtcaggttaccaccgggaatgccgtcgattacgatcagcgggcccaatccggcagcacgtgaggaaatgccgcgaatctggatacttgcctggttgttagggtcggcggcagctgtgttggttacggatacaccggccacttttccctgtatcatcatggaagggtccagactgctgatatggagaaaatccttactggagatgtgtgatacggcagaagtaagttctttcttatccagcgttccgtatccgataacgactacttcgtttagagcctgcacatcgtcttccatacgaatattgatagtcttacgcccgtctactttcacttcctgtgttttgtaactgatgaaggagaaacgcagggtacttgtggggcggacggtcagcgaatatttaccgtcgacatcagttatggctccgttagtggttcctttttctgcaacggatacgccgatcagaggttcattgttggtgtccgtcactattcctgatactttgactgttgcattttgggcgttcagtaatgcagggagtaggaagaacattccaaggagtacatgaaagtacattttccaaggataaatcttagttttctttttcatggtacaatgatttaaatgagttaataggttcaatgaattttttccttgggacaaatgtatttcgtatgggcgggagaaaaaagcaatgaagacgggatatagaatgataaaaggaggaatacgttgatattcaaatcaatgcattcctccttccaacagaaaattaaggtctgttttagagccttttcagagatattgcggggctaaattcctttctttatttgcataatgtattcttcgaactcttctttcggcacaattgtttttccttttacccgtgccttatatacatatatagtattaatagataagttgaggaatttggcaatccgctcgttctcggttacccccaaacgaattagggcgaagatgcgcaattctggtggcaggttgcctgcctcatccagaatcacctggtcttccgggcgaaagaatttattgtattccgtcaggaaattcgggaagagcttcaggaaagtctggtcgaaggatgagaacatattctcccgttcggactttatatcgaactctttatgcgtgatttgtaaatcattgaattggcgtgctttcaatttacgatcctgctttttcagcagattctctactttgtccaggtaatcggacttgccataaagagactggaagatatattggtccttaatctcgttggactcttgcagttttccattcacttctgatatttcattgaattgctgttgaatggattgtttggcagttttcagctttttcatctgcttataaatgatggacagggtgactaaaagagagatgaccagcaggctcattaccgccaatgatattgtaacttcccttttcctttcttctatcagggtgaggcgttgcttctcaatgatggggagtatagtgtttatttccatcttacggtgtcgggcattgtagaagtttgtttcctccagtgctatctgaatgtatctgctggcacgtaatacgtctcctttgccatacagataactcgaaagttcttttttagcagtcgtttcccgggtggcggagcgtatatcctgtatagctgatagtgccatgtagtaaatggcgtgttcaaaatctcccatccctatgtacatacgtcccagcatggagtagatgattgctttttcatgcggacaaacgtcgtaatcattcagcatttgcttgtacatctgtattttcttctcattgtcacctacactgaatttgaaagcttctattttctggtggtagaaagtgtggtcgggggtatacagtagggcggagtcacagtagagggttattttcttgttgtaatcagcattgaaaggggtaccttcattgtaactgctcatatcggaatacaatctcatacagagctggtagtattccgatttaatggagtccggggcatttgcaacatgaatggaacgcatcatgtcatatgcttctttgaataaaccggtggaaaggtaacagtaaaacaggttacaatctgcctgaatagatagattcttatcggtcaggcggtgtgatattccctctgtttgtatggcgtaggagtaagctgaatcgtattgataagtgatatattcattaaacagacggttgcaaaggttatacttttcctgctggttcttgacgtatcggaattgctgtttgatgtcttctaacttcttttctttttgctggtagtagatttcacggtgttctatctcgctatcgaggacagagagtatagaatccacacgttctttggcggataatccaataatctggcataggagcaagaggctgaataggtatttcatgatatgatgtgggttaagaaagtactgcaaagttagaaaaatattttttttatcatcctgcaatatacgtttctattttaatcttctgcaaattcttcttcttcctgttggtgagagaggtactttggaacctttttcctttcttgcatgttccctatcattttagatacagaagctgattgcttggctgatgaatttctcttattaggatatgtttaactgtttaaaagaaggatttatgaatgaagaaaaaatgaagagtttcacttcttatatgtttcatgtgatggaggagttggaacttgaggaacgttttggtacgttgcacgtttaccggtatgcactacgtgcctttacaggttttgtaggaggtggtgaaatctttttcggtgctttgtcgcgtcggtcgttgaagttgtttgagcgacacctgcgcgaccggctttgtagttggaatacagtttctacgtatacccgtgctttgcgtgcagtttacaatcgtgctgtcgatgcagggctgattgctggtgaatatcgtttattcagtgtggtgtttacaggggtaaaatctgagcaaaaacgtgctttgaaagcggaagaaatgcattgtttgttggatgcaaaagagttgcccggaaatatccgccaatcccgtgacctgctttctttgatgcttcatctacagggtatgccttttactgatcttatccatctgcatcgggatgatttacgaactgatctttccggacatactcttctgacctgccgtcgccaaaagacaggaagcgaattgcaggtttcggttaccgatgaagcaatgaagttgataaatttgtatcgtagcactgaccccacttcaccttatctattgcgtttcttagatgggaaactgggaggagaggtcgtctatcgtgagtattgccgtcagttgcgcatattgaattatgggcttttaaaacttgcttcatattctggtttgaaggtactgaaggtaagttcatacacggcgcgtcatacatgggctacgcttgccaaatactgtcagatacctgaagagatgatttctgaggggttgggacattcttctcttgaagtcacccgaacttatttaaaaagttttgaaggtggagaaatggcaaaggcaaaccagatgataattgattacatttattctggaaagaaaacgatgtggagtagggcttaaatctctgttactccgtaagtaacggaaaattgtttctaccacaaagttatgagttttttctttaaaacaaataattattgataaatttaactgatatttcatagaaaaacacgactctggcaagacaaacaaccgaaaacagacatattatggtcttcttgactatgagaacacacatcattctctctatccacgttgctaccttttacatggacctgtgattttttacgctcatttttacgtaatttcatattcagatgcccgccgtgtccctataacgccttatatttcctgtatttgcgtgcttccgttacttacggagtaatacctttgtatactgttacttacggagtaatagctaaatatttgcttatgttgacagaattaacacagacagctattgccgttttatgcgacatttctgcgggtagccatccctatcgtacggctcaacttcatattgatcctgagtatttgattggtattttgacaaagttagaaacaggaggtttggtgcgtcatagagatacttcttttgcagaaactctttcctcctatgagttagtccgtccttatacgtccatttctttgcttgatgttctggaaactctcgacgaacatcttaactgcaattatcctaccagtgaagaaatgtatcaacaatatcgtgcagcggctaaccgcttggggataataaaccacatgactcgaatttatttatctgaaatcaaactgaatgacttgtaatgagaaggttgctgcatatatttgtctacagtgtttgcctgttgcaatttccggcatttgcaagtattgccgattcagcaggaataagagttgaagtaagccaaacacttattaaatcctttcatgatagtatctgccataattccttattagtacatttccgtttcaattgttcgttggtggaatctgattatatggataacctgcatgcattggaatgtttttctgctctgttttccgacagcatttccgctctgtctgttgatacgataattatcacctcttgtgcatcgcccgaagggaatgttcagcataattttcgtttggcccgtcagcgtgctgttagtgtgaaggagtatctcctttggaaatattcatatctgagtcaggctcgtattcttatttattcacggggggaagactggacaggacttcgccagtcagtagaactggataatgatattcccaaccggacggaagtgttacagatactgaatgaagtgccggatacagagcgttgtaaagtgcttttgcaacatctgaaccgtggagaagcttatcggtatattgatgcacatttgcttcctcagcttcgcaatgcggcagtgtgcaccgtgaagaggaaagatgtgaaacataaaatgatgctttctgtcggttctttgccatataaaacacaacatactatatcttctctcgtaccccatgaggagaaggagtttcttgataagttcagaatacctgataagaagtccttttctccttcctttgctttaaagacaaaccttctgttcgaccttgctcttgctcccaacattgaattggaattgccttttggtaaatctaaccgctggtctctgaatgttgaatggatatttccgtggtggttgattgataatgacaagttttgttttcagttgctttccggtagtttggaagggcgctattggcttggaaatcgtacaattcgccatactcttacaggacatttccttggcttctatgcaggtggaggtaagtacgatctgcaatggaaggagaaaggatatcaaggggaattttatattgcctcgggtatcagttatggatatgctgtacctgtcgcttctcgtttaaaccttgaatttagcatcggcatcggtttgctaagaactgattataaacattaccgggctatcgataattaccgtacactgctttggcaaaatagtggaaactatacatggtttgggccaacaaaaggaaaaatctcactggtttggttgttgggacgtaaacagaaagggaggatgaaatgagggtggtaggtaatagaaggatgaaactgatagttgatgaaatggtgtgcattattctgtgtagcctgttatggggatgcgaacgccgtgaattgacctactatatggaagctgaagttactgtgacggcagactggagtcgtgcgggattggaagaggagaaggaggagggcgctacgttaatcattttcccgcaggatggtagtgctccccgtatcgtattgacaggtgaacgcgagcatactactgtacgcctacccctgggtacctatgatgccgtgttcctgaaccgatcattcaccgatttcaataatcttctgtttcgtgggtatgatgccttggaatctcttgaagcatatgctaaagatgtggagacgcgtgcatctacgcgtgtcattgtctcttctcctgataaactggcttcggccacaatacgaaactttgaagtgacgggtgaaatgctgggtaattatgttgctccggtttcatgtgacgtgagttccggcaattcctgtaaaatgcacttcacgcctataccacttgtccgaagggtacaggtgacattgaatgtgagaggtttaaataatgtacgtaaggtacgttgtacattgaacgatgtacctctctcggtttttcttcacaacggacatgcaggtgaggaactgggtagtcaggagtttactgttgggagccccgtctatgaggaaggttcattcactgagggtaagttgacaggtatgttcgatgtatttagccttgaccgtttaatgtcacattcaatgacgctgaaagctttgttggtagatggtaagacggtagtggaacaagtgctgactgacgtaattgtaaaagaaaaaatagatgacgttgggagcattacattctatatagatgcccccattcctgaaactattcccgatgtgaagccggaaggaagtgcagactccggatttgatgtggatgtggatgattggaaagaggatgaggaaatagacataccgatataaacaaagaattgtgatatcatgaatttaaaggtgaaactcttttattaattaaatatgtatcaagttatgaaaacgaaatttttattctgggcagtggtggcagctatgactgtgacgggatgctcacaaaatgaagttctggaaacaaggccggatacgaaccgcaccattggtttcggagtgtacacaggtacgcagacaaaaggtttggttacggacaatgcaactaatccatcagagggagggacagccacgaccaatggtctaaaaatgaccgataaaggtttcggtatccttgcctatcagaccactggaaactattcaaccggtggagccaaaggtacatttatggataatgtacatactacatggaatgccacaggcggtagtggcagtggtgtttgggaatattctccactgaaattctggccgggaaatagcacagatgaactctctttcttcgcttatgccccgtatgtaagtacgccaggtacaagtggtatcacattggcgaatgctacgaactctacagatccacttctgacctttaagttgcaggataatcaaaaagacatgatagatttagtagcatctaaagtggaagatcaacaacaaagttcttctaatggtaaagttacttttacttttggacatatgcttacccgtgtaacaatgctggctaaaactagcgtaaatacaaatgcccaaactaaagtttttatcacaggcatcaaattgaagcataccacgaaacttgccaaagaagcaacttacaatatgcatagtgatacatggacgcttccacaaacctctgaaacaacaaagttcttagagagtccctaccttattgcagccactacggctaatggtgtacttaagacaagcagcacgtggaatgattacactacagctggcgttgaagtgaatgggacagcatccactctgtttaccactgatcaatacttgttcttcatccctattgacggaacgggtaccactgcggacgatgatgtaaaggcagaaatctcctatgatatcgtgagcattcctactgccggttctaccgctactacaaaatcttcttttaccaaagcagtaaatttaggaactggtgtatttgccaaagggaaagcttataaatttacgtttaccataaccttgaatgcgattgaaatagctgtaacggataaccttgattggaatactgatgaaaataaacctgttacagtaaattaaaccaggtgttttttatttcaataccttctaaccaagcccggacaaggttgaatctccttttccgggcacacgatcaagaaagtaaatcgaaagatatgaaaggaataaaactctcaacttttgccgcccgctgtgtattgctcactacttgttgcgcattgcttaccgcctgttcgcaaactgatgaaacggaagtgttgtccgtttccataggctttgtacctactgtagaggcgcagacgcgtggaacagattttaccaaagataaccttacttctttaggcgtactggcttatctcacgcagggaagcagtttcaacgctttgtcctccactccaaatttcatgcacaaccaagaagtgacgaaagccaccggagcctctacatgggaatatactcccacgaaattctggccgaccaatagtaacgataagattactttctttgcctatgcaccgcataatgccaaaggcttaacactgccggctgctaccgacaggggatatccttcatttacttatcaggtgcaagctgcggaagcggcacaaatagatttgcttgtctgcactcctttgatgaatcagacttatgctactaatagcggaaaggtgaagttcgtgatgaaccatgcattgacaaagattgctatttatgtgaagaacaatgataatgtgtcagagaaaacgataaccgctttctctatccggggagtgaaaagtggaactttgacctttcaatctttggataccgatagcaaaggattcgagtggaattatccttcgtccgtcccaatggaaacatttaccactactatcactaatttctctgtacccatcaatagtgctacagaaaagaagttgctttctactttcttcctactacctaacggatcgggaaatacattcagcatcacttataaatatacaggggcgaatggtactgagaccattattttgaataatcaacctttgccttcgtccgataaatggaaaccgggaactttggtaagctatattatcagtatcgatacaaaatcgggagtttctgtaacagtaaatagtaatccagcatggggtaacggtggtgcggaaactgtggacggtagtgatatggaaacaagataattattaagaataagtatatgaaacatactttcatcagtttgggcttttattgcattctttttgtatgtagcggatgtacccgtgaaattgagataaatgacgaaggagaaacgggacaagctcgtatacctctcgttgttcagactacaacatgcgatttcaacaatgtttctgctaacgggaaaccttcgacacggatacctatggagaacggatttgaaaccttgttcaataccggtgatgctatcggtattttcgccataaaaaacggtgcgatagcaaatgccattagcaatgtaaagttgacttataaaaaaacaggtattgctatgggagattggaatccacctgctggtactacgctttattggactgctgggatgagctatattgcttattacccctataaagaagatgttacaatagatgcaactcaaaattcggatgagattgttgcttcactggctgagaaccaacttctgcaaccggtaaccgaccagtctactgtcagtaaatatactgcttgcgatctaatgacttctataggtgagttggcagatgatggtaatagttccacaaagaaaatcctgaatttaaattttagtcatcagtttacattgttagtgttgaagccgcaggcatcttttgaatacgtttcacctggaaacacaatttttacttatcgtgataatatagggagaacagtagatgtgacagcccaacaagtaatactgaatgatgttacagcatgcaagatggatgacgggagttatagggctattgttcttcccaagtctgcaacaaggattgccggaaactataaagtgaccgacataagtactggtatggataaaaatataacttactcagggcatcagactattttcaacgccggctattgctacacattaacagttaatagtactctaaatccatgtaagagagaacgacaattacttcccggcgatttcgtcttttttaaagatggcaaaatagaaatatatcccggcgacggagcttttgaaggagataaaatacctgattatgaaaatgctgctggaatgatcattacctgtgcttctgaaaaaatgacggataaggaatgcaataagaagaaatggaaccatgcctatgtaatgggattgaatactattggtgatggtagttggggtgataagactgtggttgaaaatggtattcaggttatgggaaaagatggctcaatccaggataacatgaatggttactctgaaacggagacgatactggcaaatcatagtggtgaccttagtaaatacactgcttttaaacgaatcgaggagtatcggaagaagaatctgatacctgagaatatttgtagtccatggtttttaccgagtattggtcaatggtgtgatgtattggtgaatatatgcgggagatccccgaaagatgattttcaggataatacaaatgtcggttgggaggatcatcggtatgggactgagacgagggagaagttaaatagacagttggctaaagtgggtagctccataggggagttatcaaattacaggaatatttttcgatgtagttctcagtacagtaaaatggaaagttggattattatttggcattttgaggttatgactaataatttctgggatagagtgggcataaaaggatatgataaggagagtagttcaagttatcatgttcgtcctttttttgctttttaagtatattgcatttatgcagcattttctattttaaatattacttgtgagtaagaaaaaatagtcgtcaacttgtttgtagaaattgatataaagtaagagcatatgtgaatatgtaattttgttgataagcaataggcgtgtcattgggaaaaacgttatctttggatcataaaagtaaaaggtatgagccgtaactttataatagatcaagaaaagtttctttcgggtataatcaaaggaatccttcccaagacaaattcaagcaataggaggaatataaagatgagtttgacctcgtctatgatgaagtgaagagaatagatcccgagatcctgataaccgaagaatataataaagaggattaataatgaatcgaaaacagctaactatcgaagcggaacttacgctggaagaactgcgttttgctgaggacctacgaggtattgttcgctctaatctgcaaaaggtatattcagcaattaattttggtcaggtaaataccaactggaacattggccgacgcattgtggaagaggagcaacatggacaaacgcgtgctgaatatggaaagcgtgtgattgccatcgcttcgcaagcgttgactgaagagtttggaaaaggatattcacaaaccaattgcaaaagttacagaaagttttatattgagtttcagaaatttgcaattgggcagacactgtctgcccaattcgaaaatgaattggagcggtcacactacgagcgattcttgaaaccattgagaaggagcagaaacagttgaagtatagaaaacaataaaataaatacaataactatgtacgaatgggctaatgaaatgaactgtgccgtaaccgtatgtgatacagagggagtcattctctatatgaatgagaaagcatgtcgcacgtttgccaaacatggcaatctgataggtaagaatctatttgattgtcataatccgcaatcacaggacaagatacgcggactgcttgaagcgggaggtgtcaatgcttataccattgagaagaatggagtgaggaagatgatttatcagacggcatggaaacaagatggtgtggtgggaggcctggtagagatttcgatggagatacccggagagatgccccactatgtgaggaaatgaatagtaaaatggaaaggtgatcatgcatgatgtgttgcgaaggcactgaacgaaaaatcatacatatagatatggatgcgttttacgcatccgtagagcagcgtgacaatcccgagttgcgcggaaaacctattgcagtggggtatgcggaagaacggggagtagtggcggctgccagttatgaggcacgtcgctatggagtacgttcggccatggcgtcgacgaaagcaaaacggatgtgtccgcaacttatctttgttcacggacggatggaagtgtatcatgaagtctcccggcaaatccatgaaatattccacgaatatacagatatcattgagccactgtcactggatgaggcttttctggatgtgacagagaataagccaggtattttgttggctgtagatattgccaaggaaatcaagcagaaaatatggaatgaactgaacttggtggcatctgccggtatatcctacaataagtttttagcaaagatagcgtccgattatcgtaagccggacgggctgtgtaccatccatcccgatcaggcaatggattttattgcgcgtctgcctatcgagagtttctggggggtaggcccggtgacggcaaagaaaatgcactcattgggtattcataacggcgaacagttgcgtgcatgttcgcaggctatgctactgcgtgagttcggaaaggtaggagcattgtattatgattgtgcccggggaatcgatcttcgtccggtagaggcggtacgtatccgtaagtccattggttgcgaacataccttggagaaggatatttcgcaacgttcatcggttattatcgaactatatcatgcggcagtggaactggtagggcgtctggaacataatgatttcaaaggaaatacattgacgttgaaaatcaaattccatgattttagtcagataacccggagcataacccaatccaaagaactaattactcttgatgtgatcctgcctttggctaaacaactgctgaaggaggtggattatgaacatcatcctatccggttgatagggctttccgtttccaatccacgggaagataccggggaaaaaggcgtttgggaacagttgagctttgaatttagtgattggaagtaggtggttttttgcgggcttgttcgtttatagtttcttttatggatgattttgtacccaactacggataattgaatacctccgttttaccgtaacttgcgtatctttgcctcatcacaaaaaagaaatctaactttttaatatcatgaagagaaacacgttttaccgtatttttatttccttctgcctgcttttcatggcaggtatctccgcacatgcatatactgaacgaaatcttttgcaaaaagctgccggtagtgaagaacaactgaaagaagcattggtgatggatcagaagtgggtaccttatcctgcttataacgaccgtgccggctggaacgaattactgggtaccaataaagaaagcctgattcgtgccggagagaaaatgcttaattacgaatggaaagtaatccgtgctaccgattacttagagtatgaacgcagcggtgaacggaacattatgcaaaatccctatgaggccaaccggaaagcaatcaatgccctgatgcttgccgaacttgccgaaggaaaaggacggtttatcgaccagttgataaatggagcattttacagttgcgagatgacttcctgggtactttctgcccatctggtacgccagactaccaagcgctctttgcccgattatcgtgaacaggtgattgatctgggttcgggaaattttggttccatgttgtcgtgggtatattacttcttccatgattctttcgataaaatagatcctgtaatctctcagcgcttgcgtcatactttgcaggaacgtattctcgatccttatatgaacaatgaccgggaatggtggatggctttccaatggaaaccgggaatgattattaataactggaatccctggtgtaactccaatgtattgcaatgctatcttttattagagaatgaccgcgaccgtctggcaaaggctgtttggcgcagcatgcagtcggtagacaagtttatcaattttgtaaaggctgatggtgcttgtgaagaaggtccttcttattggggacatgcagccgggaaaatgtatgattatctccagatactttccgatggaacagatgggaaagtttcgcttttcaaggaaccgatgattcgccggatgggagaatatatcagtcgtacgtatgtaggaaacggttgggtagtgaattttgcggatgcttctgccaagggtggaggcgatgcaccgttgatttaccgttatggccgtgcagtcggcagcgaggaaatgatgcagtttgcagcctatctgctggctggtaaacgtccttctgtgcctttgggtaatgatactttccgctccttgcagtccatattatggaatggagaactggaaaagacggccactgcccataccataccggcttgtacctggtatcctgaaacggaattctgctatctgaccaataaatccggttggttcctggctacgaaaggcggattcaataatgaaagtcataatcataatgatgtaggtacattttcattgtacgtcaatacgatacctgtgctgattgatgcgggggtaggaacttatacacgtcagacgttcagtagtgaacgttataccatctggaccatgcaaagtaattaccataacctgccgatgataaacggagtaccccagagtttcggtcagaattataaggctacggatgttgtctgccaaccgaagaaacgtttcttctcagcgaacattgcaactgcttatccgaaagaagccgaggtaaatagctggacacgtgcctattcattaggcgataagcaactgacgattaccgataatttctccctgaaatcagcgaaagaatctaatcaggtgaacttcctcacttggggaaaggtggatatttccgtgcccggaaaggtgacgatagacgtacagggacaggaagtaactttggaatatcccggtgagttcacagcaaccgttgaaacaatcaatttgcctgatacacgtctttccaatgtttggggaacggagatttaccgtattgccttgaaagataaagatgcgcgattaacaggtaagtataagtttgttattaaataaaaaaactatatttgcgtattagaatacaagaaacgcaaaattatgggatgttttatgaatttattatggctggtgttcggaggtatttttaccgctatagaataccttgttgccagtttattgatgatgattaccattatcggtattccgttcggtatgcaaactctgaaaatggcttcacttgcattatggcctttcggtaaaacggtgcggagtggcgaacgttcgggtggttgcctgtatatactgatgaatgtgttgtggatacttctgggcggtatctggatttgcctttctcatctggcattcggtgtggtgctgtgcatcaccattattggtatccccttcgggctacagcatttcaaactggcaggattggctttgacgccttttggaaaagacatcataagcgactgataaaagaagagggcgaaaaacctttcggttttccgccctcattcattttatttaaaggtgttattttacatggtagcctgctttgcgagcagtttttgaagtttgccattcaaagcctggcacatagttccgtttcccattgcttgatagcgtttaatacggtactgtaacataaaaatttcatttgcattctttttcataattgtcatctttttgtgctttccgcgtttcggaaagcgggttttacatcttttcttttatcttattaacgctgcaaagatatgaattgttcacgataaatatgttttaaaacataaaataatgcactttctattcgtttttctttaggattccctagttttgctatgtgcatattacaaaagtatgactaaaaatggagtaaataatctttgtacgatctattaataatttgtatacctttgcagcatcttacacataatcaacccttacaaacaggaagtcataatgataaataaactgttgacacttttacgaagcccttatccatcattggtgaagagatggaaaagcgtgataataccttcacttatagtgtttctgatcctttttgtgttgcagccttttggcatttctatgatgggaggctataaattctgggtagtgttaggttatggagtggtttcttcattggcactgagtatcttcacgtatttgtttcctgctttgtttccccgttatcatagtgagaagaactggacattaggccgcgaattgttaggaactttaggagcttgtttgctgattgcgataggtaactgtttctatacggcttgggtatttggttcattcatactgagctggaaaggatttctgataagtttggcttgggtggcggttcttgctcctttccctattgtcttctttttgatgtggaatcgtaatttgcagctggtacgtaatctgaaggaggcaacggagatcaactatgctcttgcgaaaagagagaatacccagaaggagaagattcggacaaggaatgaggaacagataggagagggtagtgcagtagaagaagtagcagaagaaaaaactcctatgcagttggttttctccggtggaacgaaagaaatgctggaagtggatgcccataccttattttatgtagaagcagaagggaattatataaaagtagcttacagtagtgcggataagatacagcaaaagttggtgcgggctactatgaagcaggcagaagaagcggttgctgcctgttcgttcattgtccgttgtcaccgggcctttctggtgaacatacgcactgtggtaaaagtagatggaaactcacaaggataccgtttgagattggaaggatgtacggaagaagttccggtttccagaggctatgcaaaagagataaaaacgctgatagaaggggatacggaagggtagtcattcgtcacagaataaagaaaaatacagccattcgtcacaggaggagtgctgtttgtcacatatccgggcagtctgtcccggatatttttttgcctgaaattcttagtctatgtttgctgacggaaattgtaaagaacatagattaaatgaaaagattgattctactttttagtgtaagtgtattgctgatggtgcagcacttggaggcgcagacagctgtgacggataccgttttcttgcaactatacaatgatagtgtagatttaaaggaagtggtagtgaaaggtaaaagaacacctgttgccaacagtcgttggagtgatatgagtccggtggaactggtgactgtgggaggtgcaaacggtgatttgtatcaggcattgcagacactgcccggcacgcaggtacaaggagaaagtggtcgtctgctggtgcgcggcggaagtagtgatgaaacacagacatacattgacggaatgcacgtcttgaatccttatacggctacaggtataaactcaccggcacgcgggcgttattctacttttatgttcagtgatgtcaatctggaatcgggcggggctccgttggaatacggggatgcactctcggctgtgttaccattggagacaaaggataagagccctatcaataaattaggcatcaatgcctctacggtaggcttcggtggaggaggtacacgggctttcgataaaggttcgctttcggtgaacctggattatcaggacttatgtgtctatgatcatatctattcaggacgtacggattttgaagatccctaccggatgatgaccggatcggcacaattccgctatcatcccgatgatgctacgcttttcaagatttatggcggctatgatcatactgacttttccaattatgaaggcactgaacgtagactgttcgatctgaatgagaataatttctatcttaatacaactttccgtaagcgtacttccggtggatggaactggtttgcaggtgcagcattctctttctttgaacagaagataggtaatgtatcactttcggcagatcattggatggaacaacaacaggaacttcatgtaaaggcaaaagtgttcaagcgtatttctccggcttttcgtctggatatgggagtggagagttttatccgccggtatgagaatcgttatcaatatcagatgaaagaggcggagggaatagatagccatcatgaaatcaatccgacgatcagtgcaggctttctttcggcaacttactatccggtggagcaactgaaggcggaactttctgtccgcacagaatatacttcattgaatgaaaaggtgaatttctcaccccgtctggctgttaattactatttgggagatgtagtactctctgctacggcgggacgatatacacagttgccggttagcagattgttggctcaggagaacaagttgaaatcgggatcatgcattcagtataatgtgggtgcacagtatgagggtgatggacgtttctacaaagctgaactttattataagaaatatgatcgtctggcattggtggaaaagggaacggtagatgcagcggaagtgttgacttccggtggttatggctacagtaaaggtttcgacttgttctttaatgaccgtgtcctgctgaagaatctggaataccaactttcctatacatataatattgccaagcggaagtttcaggaatatacggaactgactactccgcaatatgccactcggcacaatgcatccgtagtgctgaagtattccattccgcgaatcggcacgatagtcggtttgacgaaccgtttcagtagtgggcgtccttatcataatccggatttaccgggcttgatgaatgatcatgtaaagccttacaacagtcttgatctcggactgacattcctgcccagtaagaaagtgattatccatgcttctgctaccaatatcctttgtcggaaaaatgagtttgggcgggtgaataataaagctattctggcttcaaacgatcatttcttctatatcggggtgtttatcacacttgggaagaaggcggcttatgatgtttctaatttctaatttaattaaaaaaagatccgcgtccgtccgcctaatccgtgtcgtccgcgtatcaatttataaactctttaaaaaacaattcaaatgaaagcaatgattattagtttcgtatgtgttttgacttttgcaactcaaagtctgtctgcacaaaatcttactctggaagtacgtggtattgaaaatgtgactggtaaactctatgtcgccatctacaactctcaggagacattcatgaagaagccgcttgccggttttgctgtagaggtgaaggataaagttgtgtctatcccctgtaaagggcttccggcaggaacttatgccttttccatgtatcaggatgagaatggaaatggtaaattggataccggtgctttcggtattcctgtagagaagtttggtttcagcaatgatgccgaaggcgttatgggccccccttcctatgaaaaatgcagtattaccttctctgaggatacaactttagtggtacatctgaaataaacttcagataattctttaactttgtagctcacaccttaattaatgtaagtattatgagacgagctacacaacttttcggaatatgctggctactttgtctgcttgttgcctgtggagaatcccatttcatgaccgatgcctcgtatcgttcgcgcgtggagcaggactttcagcaaaagaaggctctgatgccgcagggagaactatttgcaatactggatgatgcttcgctgagcacttatgagcaggaagccctggaattcttttatgcctatatgccactggcggatattactgattatcctggtgaatttcacttaatgaatatccgcgcatcccagcgtgccgcagaagaaatgccttgggggaagaacattcccgaagatttgttccgacactttgtacttccggtgcgggtgaacaacgaacaattggatagtgcgcgggtagtgttctataaggagctgaaagaccgtgtgaagtccctttctttgtacgatgccatcctggaagtgaaccattggtgtcatgagaaagctgtctatatgccttccgatgcccgtaccagttcaccactggcaacagtgagtactgcttacgggcgttgtggcgaagaatctaccttgctggtggcggcacttcgctcggtaggtattccggcacggcaggtttatacaccacgatgggcacatacggacgataaccatgcatgggtggaagcctgggcagatggtaaatggcatttcctgggtgcttgtgaaccggaaccggtactggatcttggttggttcaatgcccctgccagtcgcggaatgttgatgcacacaaaggttttcggacgttatgaaggaaaagaagaagtaatgtccgttaaccccacgtatacggaaatcaatgtgattgataattatgcgcctacagcgcaagccaaggttatagtgaaagatgaagcgggaaatccggttcctgacgcctgcgtggagttcaaactctacaattatgcggaattctataccgtagcaacgaaacataccgacgatggtggtgtgtgcggactgactgccggaaaaggggatatgcttgtctgggcctccaaagatggtcgtttcggtttctccaaactttcttttggtaagcaaccggaactgaccgtaattcttgataagcaagcgggtgacagtttcactgtagatattgatatcgtgcctcccgcagaaagtgccaacttacccgaagtgacgccggaacagcgggcggaaaatgaccgcagactggcgatagaagactctatccgtaatgtctatgtcggtaagttcatctcggaagaggcagcacgcaactttgcgagagattataagttggatcgggatgcagtagccaagattctggttgccgctcgtggaaattacagggtaattcgtgagttcatgactcgtttgcgttctgataactccaggaaaggcgggatagaccttttgcagcagatttcggcaaaagaccttcgtgatgttcgtctggatgtgttgatagatcacatgcagtctcgtgtgcgtacgacgaatgccggatatttccgtaaatatgtgcgcaatccgcgcgtaagcaatgagatgttgactccgtataaaactttctttggtaaggtgatttcgaaagaagatgttgaggcttatgtggcagagcctatgaagatggttgcatgggtggcaaagaacattcaggtgaacaaggaatgtaatctgggagcacctcctgtatctcccgaaggtgtgtggaaagcacgtttggccgatgcccacagtcgtgatattttcttcgtgtccatggcacgcagcatgggagttcctgcacgcattgatgaggtgacgggtaaagtacagctgataactgacgacggagccatagatgtaaacttcgaagcagccggacaggcacctgcgcagaggggcaggcttgcagctaaatatacaccgattcagtcactggataatccgaaatattattctcatttcactatttccaaagtaactccgcaaggtaatttgcagttgttgtcttacgatgagggtgacacagacatgggtggcggagttacatggagcagtttgctgaaggagggaacgtctctggatgccggagattatattctggtaaccggtacccgcctggcaagtggtggtatattggcacaaatgacatcattgaatgtgaaagcgggtggacgtacagaaacgaaactggtgatgcgtgaaaataaagatgaggtacaggttatcggaaacttcaattcggagagcttgttcacaacattggaaggcggcaacaagcaaagtctgcttcaagcctgtggccgtggatacttcgttgtcggtattcttggggtgaaccaggagcctacaaaccatgccttacgggatatctctgctttgaaaaccgatctggagaaatggggtagaaagcttgtattactcttcccgaatcaggaacaggccggcaaatatcgtgctgctgacttccccggtttacccaatactgtgatttatggaatcgacacagaagacatagctcaacagattgtgaagaatatgaagctgaaacgtaaagatacattgcccatatttatcattgccgataccttcaatcgcgtagtatttgtttcacagggttataccatcggcttgggtgagcagttgatgaaaacggtgaaaggactataagaaaagcaacaatagagtgtgagaggcttatttgcaagcctcttccattttttgtatcacttccggtgaaggcaacccctctgtcattcctgtcagcaataaactgaagttatcggctaacacttcttccgggtcaatgatgtactgagtattacgtcccattctgtcataaaaatcggaggcttcgttaatagagtaaaccactgccttaccttctttctcaatcgctttgcaggtatttttatcgatgggaacgaggccaatgttgaggtattggaagaagctgcctccctcataaggcctggttgaataaataaccatgcagcaatctttcttttcaccgttgatggtaaaagtagcataactgtcgtggcagataacatccggattggagataaaccgttctttcaactcttcgggaaattctatttccttcggaagaatattaaaaccgatgatgctgtacatcttcttgcggaaatccggattgttccgggtaaggacgtgaaatgcttcatgtgccaacaatttggttacatattcaggatgttcgagcaacctgtcgataagtacgatgtaagtatctcgggtatatcctcctgcaccaccttcttcttttatcgttgactttatcagtctgacttcttccgggaaaggaagtttcagctctttttcacggataatctgattgatggattgagatgatttctgaagcagagccgtttcctcatcattccaattacgggtttgtgcgccggcaaactgcaaatatccctgttttccgccttcgatgccaacggtatgtgaagccaagtcaaatgagctccatctgcggatatgctcgtcctctttctgaagtaggagtgcggcttcttcctgtttcaggaaagtaggggcaatgctgtcggaagtggagtttgaggaactttgatttttagcttcatgcgcacatgaaatgctgaggagagttaataaagtgattacacttaatgccttcatattgattgttttaaattaattcttaatgggaccggtcaacgcctttattgttttttttacgcgttctgcggtagtgatggggcgacaatactcttctatgttcacagtaccccccatcgaaactgttccgttcctgtgcagcatcttgctttcgatggtctctcttgctgagaagtggaactcccggataccggtttccatggcgatgtgagcgatattattttcatttactccgcaacctgccaacaggataatgcgcccgtctgcctgctgctgcaatttttttaataaagggatgccctgttcggccgtggcctgtgcaccggaagtaagaatacggttacaacctaactctatgatttgctccagcgcttcctgcggattgcggcatacgtcgaaagcacgatggaacgtaacggacataccttgtgaaacttcgatcagctgcctcattaaggacaggtctacatctcctttagcggtaagacaaccgaatacaactccgtctgctcccaatcgacgggcgttgtcgatatccttcagcataatgcgttgctcgatgggggagtacagaaaatctccgccacggggacggatgatgacgtgcagaagagtctttgttaaggcctcccgggcaatgacgatatctccgtaggatggagtagtacccccttccggtattccggcgcataattccacccggtttgctcctcctgcctgtgcggcaaggcaactctccacggagttggcacaaacttcaaattgatattgctccataattgataatcaggattacttggtttgtagatgcaaaaataagaaacagtttcgtgaatgacaaagaaaacaaaaagaggcagggattttttgtttccccacctctttatcactagtttcaatctttacaatttatttcgcataacttactgcgcgtgtctcacggattactgtgatcttcacctgtcccggataagtcatctcatcctgtatcttcttcgcaatttcaccggaaaggttttcagtctgcttatcgtcaatcttatcagcaccaacaattacacgcaactcgcgacctgcctggatagcatacgtcttcgtcacacccggataggccattgccaactgttccagatcgttcagacgcttgatgtaagcctcaacaatttcgcgacgtgctcccggacgggcacctgagatagcatcacatacctgtacgatgggtgccagaaggctcgtcatctccacttcatcgtggtgggcaccgatagcgttgcagatatctggtttttctttgaatttctcagccagcttcataccatagagtgcatgcggcaattccggctcttcatcgggcactttacctatatcatgtagcaatccggcgcgttttgctttcttggggttcagacccagttccgatgccatcacagcacaaaggttggctgtttcgcgggcatgctgcaacaggttctgaccataagaagaacgatatttcatcttaccgataatacggatcagttcaggatgcaaaccatggataccgaggtcaatcgtagtacgtttaccggtttcgatgatttcttcttccacttgcttgcgtactttagatacaacttcctcgatacgtgccgggtggatacgtccgtcagtcaccaactgatgcagtgccaggcgggctatttcacgacgtacggggtcgaaagctgataatacgatagcctccggcgtatcatctaccacaatttccacacctgttgcggcttcaagcgcacggatattgcggccttcgcgaccgataatgcgtcccttgatttcgtctgattcaatgtggaatacggtcactgaattttcgatggcggtttccgtagctacacgctgtatggattgtattacgatacgttttgcttctttgctggcagtcagcttggcatcgtccatgatgtcgttgatgaaagattgggcctgcgtcttggcctcttctttcaaagactcgatcatacgttctttggcttcgtcggccgaaagaccggaaatggtttccagtttttcaatttcctgctgttgcagtttatccagttcgtctttcttcttgtcgataataaccagctgggcttccaggttttctttcaccgcttcagcttctgatttcttacgctgtatctcttcttggcgttggttcagcaccaactcacgttgtttcaacttgttctccgcttgctgaattttctggttgcggatcgctacttctttctccaagtctgcttttttgttcaggaacttctcctttacttcgagcaacttattctttttaatcacttccgcttcagcctcggcttctttcagaatgttgtcatatttggacttcaaaccatgcttgaagaacatgtacgacagaaatccaccgataatgaaacaggcaatggatactagtattgttactgtcatttcaatttgttttaagtatataaataaaaaacgcactgtaggaaagccaccctcattctttttaagagggacactttcacacagtgcgtggattttctaattcttttgctggctttggtgttctggggaaaagcttccggacgtttacagtcctttgaagtatgtttccaacacctctgtcagttcttctatcttgtcggcatacggacgagtatcgtttcggtttttcattttcaggttctccaaagcaaattgataggccaccatggctataattttttcgggagtcacattctggtaatgttctcgatacgcattgagccgtatatccacctgtttggcggcttctctgaccatttcttcctcctcgcgcagtatggtgagggggtaggttgagcctgccatttgcaggtttatctttattttatcgttcatacatctcgttattcattcaacaaagcgatgcatttatcgacttcacgcactaatttggacaatcgcagtttcgtctcttttacgtcgctgccgttaaggctgattgtcattgctgtttttaggttcgtatagtcatcttccaaagcttcatattcggcatgtacctgctcgcattcttcttgtttagtttttagaagttgctttaattcagcattttcacgcctcaattcatcatgcaaaaagatcaaatggcgcagtctcgcttcaaaggtacttaatcgcttcttttcttcgtcagtcattactataccaaaattgtacacaaaaatacaattaacttggagattacaaaaacttttcagggaaaaatgttgtaggagaggtgaaataaccggaaaaaggaatttgtgacgtttgaaaatggaatcttcggcggtggctaaaaactatatcaatttgtacattttactaatcttgatactgcgatacactaatatttttcttgcataatattaatcttactacaactatgtttctttcttacaatagatgtggtaagaatataacatagttgtagtaagaaactaatataactgtggtaagaataatattattaatcctgatgattagtttatcgcagtgcaggaattagtttcttgcgacatgacatttagtttttagttatatattgctcatcataaaataatttatataataatttggtttataaaataaactacttatatttgcagtggagttcgaacccaaaatatgtttttattgtgaaaatctaaattgtgtatgattatgaaaatgactggtattaaatgggttacgctgttagtgttagtctttggtgcagtatctgtttctgctcagagtgacttgacggtgaaggtgaagaatatccgttcggcgaaagggaaggtgatgattgctgctgataaagggcagtatgcgatggcggacgctactggtgatacagtgacgcttgtattgaaagaagtacccgaagggaaatgcaaattgtatgtgtaccacgatgaaaacggtaattatcaattggacagagtagacggtgtaccgacggagaattgtgcgattgtggatttagacatgacagctggagcaaaaacaattgatgtcgagttgaccgatctgcggaataaagctaaaaaataatttaatggaagagaaagacattattatggaagacaaagaattgaacgagcaagagagtttgaaacttatcactcaaatgatacagaatacccgacgtaatttagatacgggtagtggaaatatgtttttgttatggggatatgtttctgcaatagtgacgttggtagtttttgcaggaatttattggacgcgaaatcctgtttggatgtggggcttttggggagttccggttttaggttatctctttagcttcatactggtacgtaagcaacgtaagctcgcaaagtcgtatggcgataaggtcttgaatgaaatgtggcaaatcatggggctactttgtattgcgattgtacttggagcaacgtttaccaatcattatgagataattctgccgatatgcgcaatccttatttctctaagtagcattataaccgggagcataattcgctatacactcttttccggtttccctgcttttggaattgcattgggactgaatatgttattcagtattctggataagacttcttcctatttgtcattgttagaatttgtattggtgattgtttttgcattgattattcccgggcatatcctgaattattgtgcaagaaaggataataaacgatgaacaccgaatcgttaacagcagaaaaagctgatatgtttgaagaaggcaatatagaggctattacccgaatgatgcaaaatcgcaagaaaaatcagctttggctggcagttacctcactaatggtattttgcctgtattggctttctaatgtggtgttatgggtgccttggagtcatagtccgcaattgggtatcattctgatgctgactgtaaatcccgtcttttggggagtaggcatatatgtttgtctggcttgcgaaagtggagtaggaaatctgatgaagaaagctcttctgctagccttgattgcggtaggaatatctttgctatccgactatttgttttttgcagtatacatgaagtcaaaggacgtatggcacattaccacattctatggttatgcctggttagctgtattggcttttggggaggcgctcttattaaagaaaaaattgatggctaaacagtatcccgtaacgaaaagactgtttttggtattgggcgttttcctattagtgttattgctgtctttgtcttacctattagtagaatgaaaaaatgggaacttgggtgatatatatgcttgcgggtaattgggctttgatgctctatttaatactaaatgtatatgattgggaaaagtgatatattaaagaaagggaatcaatcatgaaagcgaatcgttgggagagttttttaacttcctggaaattcttttcattgctggtggtattgcaattcattttgatgcctgtagcgacgaaagattttaggtttgaggcagcgggagacatcgtattctatacgttgcagcatgcctttattatggatatgtattcatacagcttttattttcaggtggtgatgatcctggctttgatagctgttgtagtctggaagggaaagtttagcagagtttttactgctattgcaggttgtttttacctgctttatgctgtgatacagaatatggctgtaacagaacagcatggtttcagcatggtaacagtgaacgttgcaatgattggtttcgttgcattagtctggctgtgggctgcatggaagggcaacaatgagttttcttttgataatgttacctggaaaaccggttggacgatacctgttgctctgttttgtttgtggtggccgatgagtctgaaaacggcattgccggattttcagctgcattatttgtatgatggcggttcggcattggctttctgcccgatgactcctgtgtttctaactttgcttgtactaagtaaacggggagtgaacagggtagtgttgcgggtgacggcaatggtaggagttattatcggatgttataatatgggtaattttgcttctgagaccgggttttatgtcggattgtaccacttgcctctgctgggcatgtccatttatgctttgttgagcagcagacagaagagacagaatccggaatgtgtatgattaaaataatttgtattgaatatggacaataagaaattgaatgagcaggagagtttagaactcatcactcaaatgatacagaatacaaagttcaagatggtgaaaaacgccggaactccttttttagtatggggatacatgactgtggtgacctctttgctggtttggtatcttttgaaagaaaccggcaattattactggcagtttttatggcttctgatgccggctgtttcttacccggtcactatctatagccagaggaaaaagcaaaggatggcaaaaacgtatatcgaccggatagtaggatatgtatgggtagttttcggactatgcggattgctgatttcatgtgtatctatgatctattggagtctgcctatactctttgtgatcctgttgatgatggggatgggaactactttaaccggactaattataaatatgaaactggttacggtaagcggtgtgctgggtatatttgcatcattgggttgcctgtatatagacaagtttgatcagatattgctttttgctttagcctttgttttcatgatggtcatcccgggacactatttgaacataatgtcaaaacgaagagtttaatgtattatctttgcactataaaaatagaaagaaagcatgtttaaagaactgaaccccttactgcattccgaactgcgcctggcggtgatgtcgttgcttattggtgtcgaagaggcagattttgtctttatccggcaacagacgggggcaacggcgggcaacctcagcgtgcagattgataaactcaataaagcagggtatgtggaggtgacgaagacgttcaagggaaagatgccttgcactatctgtaagattacgccacagggagtagacgcttttgaggaatatgtggaagcactgaaaacgtatattataaaataatgaaagcagactttataatcagagcagctttgcagtcggatgctgttgagctgaaaaaattatttcagaataccgttctcgcgataaataggcgcgattactcacaggcggaagttgaagactgggcatcatgtggggatgatctttctaatatagaagatatgataaagacccattattttattgtagctgttaatcaacagtcggaaatcgtaggtttttcatctatcactccccagggttatttacactctatgtttgttcacaaggattttcagggtgaaggcattgctacaatacttttgaatgaaatagaacagtatgcaattacaaatggaattatgcggattacatctgaagtgagtttaacagcccgccctttctttgaaaaaaaaggttatatagtggaggaagagcaaaagcgcaaggctaatcagctttctcttactaatttctggatggccaaacagacgatatgtccgaaaaacttatagaatagacaaaaatcagattgaagttttccgatactattctctttttcttgtaacatttcggagtgacccgtatctaaaggaaaaactttagaatatatggtgatgaaaagattacttttgaccctgatgttattgggaacttctcttttgatttttgcacaggattatcctttttcggtagtaaaatcgggaacaggaaaacaagcggttatatttatacccggttttgcatgctcgggtgatgtctgggcggaaacagccagcgtattgaaagacagctatacctgctatgtgctgacgatggcgggcttttcgggtgttgcacctgaagagtgtccatcattcgagagatggaaaatgcagattgcaaagtttatcaaagaggagcggatagagaaacctattctcgtggggcatagtatgggaggtggtttggcacttgcaattgcggctgaattcccggagcttacaggaaagattgtgattgtagatgccttgccttgtctgatggctttgacagttcctgattttaaatctgctcctgataatgactgcacagatttaattgacaggattacagctatggatgaggagcaatttgcacagatgcaaagaatgagtgcggcaacgcttaccactgattcattgagatttgccgaaatagtaaactggggattggcatctgacagaaagacgtatgctaaactattctgtgatttctcgaatacagatttaagggaatgtataaagaatatagttgtcccttctctcgtacttttggaaccttatttcaaacatatagatacggtcattaagaatcaatataagaatttgtcagtagcacaaatcagatatgcagataaaggcttgcattttgtgatgtttgatgatagggaatggttcattcatcaaatttgtgaatttataaaagagcgttaagtggaatttgaagatatatataggaggtactggaataaaatattccgcttatgcatggggtatgtaaatgactacagcttagctcaggacatggctcaggaaacttttattaaagtctggcaatatctgcccaccttcaggaatgaagccaatattgatacctggatatttcgtattgcaaccaataactgcctgcgtcagctggaacggaagaagcaaatcttatctacgcagtttcctgccgatctatttgaagatgaaaagacggatattgagccgcagattcagttactatacaagtttattgcagaactttcggagatagaccgcattatcatttcgctggaactggaagatgtcaggcaaacggatatagcgcaaatcattggattgtcggagagtaatgtccgtgtaagaattcatcgtataaaagtccagttaacaagaaaattcaaagaatatggagagtaatattgatataaaagaattgtggaacaggcagactgttccggctgccgatcaatctgaaatattgaataagatcagccatttcagaaaaaacggtcttaaaaaggggatatttcttgatgttatcttagtgttgactatcctttttatgatatttatctggatctatttcaaaccgcaattcttgagtactaagattggaatcattgtgggaatcctgccgatgtgtattgtggtggcggtcaatcggaagataacttctttgtataggtcattggacgagaaacagtcgaatatcgattatctgaataatttgcttatgctgaaagggaaagaaactttcatgcagactaaggtaatgagtttatatttcattttgctatcctccggtatccttctttatatgtatgaatatactcttaattcatcttttacgttcagactgatagcgtattctgttttgtttttatggattgcccttaattggtttgttctacgtcctgtaatgattagaaagaataggcggaggatggattgcttgatcagacagattgaaaagataaagtcgcaagtggatgaattttagtttctaaaaaaaagttgtacatttactcgctcaaaataaaaagatgcagtatgaaaattttagttacttacgccgtacagggcgagtttacggagttaaagtttcccggattgataggagaggaagaagttcacatcggctatattcgtacgggagtaggcaaagtgaagtcagcttattatgtttctgaagtactcaatcaggccaagccggacttggtgatcaacgtaggtacggcgggaagcattgattgccaggtaggagatattctggtgtgccgtcattttatagaccgtgatatgcagaagttagccgatatgggtttggaatatgagattgattcttctgccttgctggcagagaagggatactgtatgcattgggcaggagaaggcatttgtaatacaggtgatacttttctgacggaactttcggatgtgaaaggcgatgtggtcgatatggaagcttttgcgcaagcctttgtttgccgtgccaagaatgtgccttttattgctgtgaagtatgtgacggatatcataggacagaattctgtaaagcattgggaggataaactggctgatgcacgtaaggggttgggggaattctttgaacagataggtggagcggttaaataagcatctacttcagtgtcttaaatgaaaggatatgataggttactcctgctgcaataatcaggagtattacttttacccatatatatggaacgataaaaaacacgcagtagagcatggtgatccacatcagcgagatggaaattatctttgcacgtagagggatagctttgttttcacgaaagttgcggatataagggccgagatgtttatgatttaataaccagttatataggcggggcgagcttttaaagtagagtgctgctgtgagtagcagaaatggagtagtgggtaacaacggcagaaagatgccgaggataccaagtgctaaagagagtgtaccaagtgctatataaagggttttcatgccgcaaaagtactctttttttgtttacggagaaagttctgtttgctttgttgtctgacattcgctttaaatgcttatgtttgcgaagaattttcaataaagtcaaaacatgtatttgagaaagtccgtcatcacgctattgctgatactgtgtaatgtatttgttgtggtggcacagaccaccgcagactctttagcacttgttactgctcattggaatgtaacttctatgggaaaaggtgtactttgtcgcgaagcggagttcgtttctttatatggtgttccgcagcatgttgctattcttgaaatcaaaccggaacaacatcggtttgacattttaattcattctcctaaagaagaaaccagtagtgcggcccgtcgttccggtgcagtggcggctattaacggttcatatttcgatatcaagcaaggaacttctatctgctatttgcggaaagacggggtggtggtagatactactgcgaccggtgtactcagcactgtatccaatggtgccgtgaaaatagataaagggaaactggacatcatagcctggaagaaacaggatgagaaaacttgcgaacagaaagaagggagtattctcgtttccggtccgttgatgctgctggatggaaaagcttgtgacttgtctgcttgtaaccggtcattcgttcagactaaacatccacggagtgccgtggctctgatgaaggacggaacggtgtttctgattgcggttgcgggccgtttcgaaggtaaggcggaaggtatcaatatccctgagttgacacatcttctccgtgtattgggtgcaaaaaaagctttgaatctggatggtggtggctctactacactttggagtgcttctgcaccggataatggaattgtaaacaagcttactgacaataaactttatgataataaaggggagcgtaaggttgccaattcactttgtgtttacgaataaaagcggaagatttaaactgtaatccttagaatttttgtacttttgtgccgtgccgaggtgacattaggtgcgacaacagacaaagtattttcttaattagcgtattaacaagaatatgtatacagttatcaaacgcatggaaatatcagctgcccatagcctgaaactttcctatcgcagcaaatgtgaggatctgcatggtcacaattggattatcacagtctactgccgttcccgggaactcaatgccgatggaatggtagttgatttcagtcacatcaaagaaacggtgaaaggaaagctagatcaccgtaatttgaatgaagttcttccattcaatcctaccgcagagaatatagcccgctggatatgcgagcagatacctacttgctttaaagtcgaggtgcaggaatctgaatccaatgtagccacttatgagaaagaataaccctactgaaagccggcacaaatattttttatgagaaagattaatgagattttttatagcttgcagggtgaaggctattacaccggcacgcctgctgtctttatccgcttttccggttgcaatctgaaatgctctttttgcgatacacggcatgaagaaggtgtgctgatgtccgatgatgaaattattgccgaagtaggaaagtatccggctgttacggttatcttgacgggtggagaaccttctctctggattgatgaggcttttatcgaccgtttgcaccaggcgggaaagtatgtctgtatcgaaacgaatggaacgaatccattgccccaaaatattgattgggtgacttgttctcccaagcaaggggtgaagttggggattacccgtatagatgaggtgaaggtcgtttacgaaggccaggacattgaagtctacgagttgcttcctgctgaatatttctttctgcaaccctgttcatgtagtaatattgcagaaacagtggcgtgcgtcatgcaacatcctaaatggcggttaagtctgcaaacacataaactgattgacattcgttaatgaatcgggtagtgttataggaatgtaatgtgaatgacatctttcttttgctttttagggcttactttgccgtgaaattaaaattctaaaaagagaagaaacatgaaatcaattcgttttttatccttgctgcttttgctgaacttgtttgcagcaggagggtatgcagcagaccaccccgttaaaaaagagattgccgtaagtggtgtggtgacagatacgcagaaacaacctgtcgcaggtgttgttgtgacagatggcgttaattttacacagactgatgataaagggcgttatcagttggtatctgatcccgcacagtctaaattcgtttatctttctgttccggcggactacaaaactaatgtagagaatgcattacctgttggctattatgcccggattgatgcaaaaaagaaaaagaatcgttgtgatttcagcttggtgaagagagaacagccggttcaggattttacctttatagctatctctgatccgcaggcaagaaatgaggaacagctggatcgctttgcttcggaaactgtggttgatttgaaggaaacattgaagcaattatcttcgcaggaagtctacggaatggttctgggagatatcgtctgggatgttatgcctttgtatgattcatataagaaggttatctctgatttagatttaactatgtatcatgtgattggtaatcacgactttgatcagcaatatacggcactgagccttgctacgaataaggaagaatacggagaatcggtgttcggtgaccattttggaccaacggattattctcttaatgtagggaaagtgcatattatttcgatgaaggacatagactataaaggtaagaagaaatatacggagcagtttacccctgaacaattggaatggttgaaaaaggatctgagctatgtgaagccgggtactaccgtactgttgaatcttcatgctcctacggctaacagtacgggtagaggaggagctaatgcccgtaatgccgaacaactttttgagatactaaaagattataagacgcatatctttgtcggtcatactcatttttatgaaaaccgcattgtgactcctgttatctatgaacataatattggtgcagcttgtggtgcctggtgggcaggagatgtaaatcgttgcggtgctcccaatggttatctggtggtgaatgtgaccggtgatgacatctcctggcagtataaggctactggtcgtccattcgattatcagtttcgtgtgtataagccgggtgagtttcagagccaacctaagtatctggtggttaatgtctgggattatgatccggcatggaagttatcctactatgaagacggtgttgagaaaccgggtgtaatggaggcttttgacgatgaggatcaggattatattacaatgaaagaaggaaaagctacaggctatcatacatcgcacttattccgggtacgtcctacggataaggctaaatccgtgaaaatcgtagcaacgaatcgtttcggtcagagctttacccaaactgtagatttgaaatgggggcagtagaaatttagtggggatatccatatatctttgccagcctaaaaagaaaaaactttctgtctgccactccatgtaaatttgccctaaagagtttaatcttggcgttgaaagattcggctgccgcgtttgatgccctgttgttgtagaagtttagaatatcatcatagtgttcgtagaatgtagccgcaatgacattgaaagattttatccttgactcatccactttattataccatcgagccatgcttagccttgcagcgtccttaatggtgttttttgcaaatatcatccttaatgaatgtgagagcccataagccatttgtatatcaggatattccttaaacagtatttcagccctttccttttgtttttccgtccacttttccgcggatttaaacaagaggtatctgcttctgaccagcagttccgggcgggtgtctccgtttgggaatcggtaaggcatgtatgactttcccgcttgtttacactcctccatttcttcattgctctgctgtaaggcgtcccaacgatgggctacgcggatttcctgtacagcatcacaggcgagtttctgtatatgaaaacgatctatgacgcgtttggccttggggaaggcaatggtgacaatcctgcgcatggaatcggacaggtcaagggtcacttcctccacagcttcacgggctttctcgtttatttgtttgagcacctgtatgacatcctccgatttggtgcctgcgacagctgccacaaggctttcctcatgtgtatgccggtcacggttggtgacaaaagtgtataattctccattagacagagacgactcatctatagccaaatgcggaccgatgttctccgggaataaaatccattcatccgcatgctccaactgctcccaattcctgaaaccactgagtgtttccttgtactgtttctcgaaagtatgtccatctatatggtagaattcctcaagcgtacggcaggtcacaggggacgtctccatacgtttcttttaaaaaagcaccaaattccttggaataacgggtacctttacaaacgacatcaaggttgatagggatactgaaactcttgcctgtgcgcgtatcggtccagcgacgacggcggatcttcaggaggaccttatggtcacggatgggaaagtccgtgatacttactgtttccatgaagcccttggattcaaagtgtacatcatgggataatgcaggattcatcagttcatcaagatgaatatgtatttctgttgaggtctgttcaacgccgacaactgaaaagtagttgaggatttcagagggaagcacgatgcgagccaacacctccaattgatttgtttccatgaggcaaaggtcggaattttgggtgagaataggaaacgataatccccactaaatttctactgccccttgaaatgacaggctttgaatacttgtttataacgggtttataaacaaaaatagctgcaagtaaaaacttgcagctattttcatcttgcacgggaggagaggctcgaactcccgacacctggttttggagaccagtgctctaccaactgagctactcccgtgtttgcggctgcaaaggtaatgtaaactttcaaatatgcaagagagatgagcgattattttaacgctctctcgtcttataacatctgtaagtcctgatacataatgcggtaggctgctgcttttttttctaaagcaagcggataagcgcgcgaagaagaaggcatccgatagagtcgcataggtctgccatcaaaaacaaactctgtaaaatctcccactttcggcttttcaagagagaactgttcgcataaagtttctgttgctttctcacctgtggtaactatggctttacattctggtaagcgacggagcataccctcgatatccgtaggttctacaacttccagaaatttgtcggatgcattgtcctgcaaccgtcgtatggcggtagctgtatcaaatagggcaataccttttttttgtaggaaagggataatgcgatctttgtcgaaagcttttgccgcttcgttcagaaaatggttcttatcattgaagaacaagagtcctacaatccgccacatatcattgttccagttcggataataaaactccatcgaccaccttttcttttgaggtggaaaacttcccagcatcagcaaacgggcgttagcaggaagaaagggttctaaagggtgtcgctcgatttccatacttactatttttaggataaaaaatgtctgaaaagcccggaatatgattcagacttctcagacgactctgtgattttcttatgcaaaagtatagattatttccggaagttactctgctatttccaaattactcattttttctgtgatgcggaaagggaagtccggatattcgtacaggctgaaccgtgattcggttttgccttccgtataattccagatacttgcgtagtcttccacatcttctcccatggcacgcagttgtcgcaggtacgcggctatggacttattctctacgatatagacctgtccgagctgattgattatcgggctgtggcgacgtgttccgtcgtggtcgaaacgaaggatacgctttccgtcttcggtcattcccaccagattgaatgtcatgctcttgccaatggcgggcaggtttaacacgctgcggtctgtggcaagaaacggaagatgatgtatcttcaggaagtggcggatacaggatgcaggatcaagtgcggtttcgagcgatgcagacaggttgaaggcatcttctttatttagtttgccgaaacgcttttcttcttgctgttcctgcatggaacggctgtttggcgtaaagactgcattattttcttcgaaaccttttacggagaatgtatagtaacagacaactcccagttcgttaagtacctggcgtaggcgagtggtatgtccccgacgtgaggcagctacgttatacacaagttggttggtaatcagccagcctgccgataataatttgcgaataccttcctttgcctcgggagtaacctccagtggagtttggaaatgcgtttgaataatgaactgacggataccgatgacggatgctttctccttgaaagttcgcagaatttctaccaattcattgttgatacgcattggcagataagctggcaaacgcgatccgaggcggatacgttgtaattcggcatacttttctccttccgggcgttcctgattggctttccgtttacgggcagccatacggtaaacggcttccagaattgtgttcagcgtcttgttctgactcatgagggcatctccacctgtgatgaggatgtcacgcaattgggtatcttcctcgaagtaagtcatcagacggcgtaatttcttctcccatgtttctttaggacgcagggagtcaaactcaaaattgagtcgtttgctctggaagtcatacatgcgttggcaggaagcacaaagcccgccacaagcgcgtcccatggtgtcgggaatgaggatggctacttccggataacggcggtggatattgtgtccgtcgggcaggagccagccggccgcattgggttttccggcttctactatgtcttcacgttcccaggcgcggatttgcccgtaagtttccaccagttgcggggagtagaggatgtagctgcgcagagattcatcgttgtaccctgtgctgccgggatttaacaagtgcagatagtaaggcgtaacgaagaaaggcattcctttcttgcgggcacgagataacagatacatggtttcggcagaaagtgaattgcccagaaagcgattcagttctgtagggcttttggcagccatggccagatggaaacggaagtcattccaccattcgctgacaagacggtatttctcttcgtagctgattccctcttcaaagtggtagcgggaaacagcggtacggtgctctatcttctgtatcaatgcgtgcagaatacgctctttatttttggcatggatcagttgtacgtcttcgtccagtccgctgggccaacgctcggtccacgctttgacgcgttggggtgcggggagtggggcagcaggatgctgtaagcgtttgaattgctggaaaatatccaggaacacatctgtttccacatcttcttccaggtttccggtaagaaacgcgtatagaagtgacagggtagaaacaatcatttgttcatcggtagaaagttcatggactttctgaccgtcatattcaatcagaagtcgaatttgcctgacaacttcactttccgtatcagcctgattggtaatgaattccgaaatgccttgtttgaagctttccgtaccgtcgctctgttcggcgatgcgtacaatttcgggaagttcatttcgataaagttgcttcaactgggataaagtgagtgcaagcattttcttttgtttcataagcggttgttttttaatgattaatactgaaatagttgcgagctgcgaactgcaagctataaattacgagctacgagttacaaattataagctacagataactctgaaagcctttcaggctgcctgacttattgagcctaaatcaagctatttgaattatcaaatcttctgaattatgaaatcttctgaataatcagattacttgaactaataggttttgaactatcaacttatcagagtttttttaacttccccagtgcaatggtttgtcactgatagcttgtagcctgtggcttagcggataaagtccgctatatcttacaacaatctctttgcataaagtgttgttgctccttcgagcaaaaaagttgcataaaaataacaaaaaaaggcgaggaaatcatttctcgccctttctattgattgtttctttagaaaactttttcttttgataacagtttttgtctgatagatatttcaagcttatttctcttccgtggctttgtttttgggttcttttttagccagtaatacaacgttgtacacgtattctgtcatccactgctcggagtatcccagacgctctttatattggcggactgccatagccgtcttatgtacatcgtcctttttccatacggttttggtgcagacgtcatgtacggtcttttcggtcatactgcgcagtgcgcctttaaaaacagagggcacgcggaacttccattgcatcaagttacccatcaacatcatcaggtcttgtgagaagccttgatacataaacaagtatgcctgcacatcattctgcgtgcggcaatgcttctttacggaagcgtcgatttccttgaagaagttttcactcagtccatagtcctgcatcagcattttgcgtgaagcagtcttttcggcttgtcccagtcgtccgccctgagttggtattttgaacaggcgtttgaagttggctacatccggcacgaaacgaatgttcgtaattcccagattagcggcaatcacggactggaaataaacgcgtgtcagtgacacgaaatcttccacgtttttggaggaagtaccctcggaattctttttaaatagtttggcaaatatacccatcttatttatgttttatgatttatgatttataattgccggggcaattgcgattgcaaaagtacgaaataagttgatttacaccaacaattgtataaatcataatttataaatcataaatctcttaccagcactccacgtcattttctacctctttgaggcggtcttttgtgaaaacagggtctttgatacccgcccgtttctgtgcacggtagtcttccagcagtttgaaagcgtatttaccgagcaggctgatggcaatcagattacagagcgccatcaatcccatggtgacatctgccagactccaggccacatccagtgcagcgagcgcaccaaatagtaccataccacctaccagaatgcggtaaatgttcaatatccatttcttacgggtaagataacgtacattggcttctccataataataattacccagaatgctgctgaaggcgaagaagaacaaagcaatagcaacaaaaatgcttcctgctgaacctatctcattcgtcaatgcttgttgcgtaagttgtaccccgttggtagagccgtccagcggcgcaccactgaaaagtataatgaacgcggtgcaggtacatataattaatgtatcggtgaaaacgcccaaggtctgtatcagcccctgctttacgggatgtgtgacgtgtgcggtggctgccacattgggagcggaacccataccggcttcattgctgaacaatccccgcttgatgccttgcatcaatgcaatacctacgccaccacccaatgcctgttgccagccgaaggcatggctaacgatgagtttgataacggcaggaagttcagtgatattgatagctacaataatcagtgccaaagcaatatatcccaatgccataatggggacaatgatactgctcactttagcaatgcgctgtacaccaccaaagataataagcagcgtggctatggtaataacccctcctacaatagcgtggtcgaaaccgaacgcatgttcaaaagctgcacacagtgtgttgctttgcacggagttgaaggcgaagccgaaagttatcgtaatgagtacggcaaatacagtacccatccacggttgtttcaatcctttccgcatatagtaggcgggaccgccaatgaaggaatctttgcctttcaccttatataattgtgccagtgtggactccacgaatgcactggcagcaccaaacagggcaatgacccacatccagaatactgctcccggcccgcctacagcgatggcagtggccacacccgccagattgcccgtacctacacggctggcaatggagatggcaaatgcctgaaatgaagagatatgcttttcacccggctttccgttcgttcctgctgagtcacccagtaaacgtaccatttcacctatcatgcggaactgtacgaagcgggttttcagcgtgaaccaaagggcacatcccaaaagcagagcgataaggatataggtccagagaatatcgttgattgaattgattatattcatgctatattgttttatatttacttgtttaatgataaactgccggttcttctgtctgaatttattgattataaaggtcgcaaaagatatattttgtaactgattgaatattaatgcgttgtgttgaggcgttctaagacttcgactgaggtaccctaagtatacgactgagataccctaagtatcatactgaggtaccctaagtatcatactgaggtaccctaagtatcatactgagataccctaaaataacaactgtttctgttttttgtttttctgtaaacaagtttttcttcatatccagaaagtagaagtcaggattgaagaatgattatttattttaatctgaagtgaaacttatgaccttcaaataccggttctacaatatcaaaccggatgaacttggcaagtaaatgttccgctgcacgtcgggaaaggcgtgccagcctacaatacctgttcagcgatagactatcattttcttccaacaagtcaagcaataactgttcacgctctgtataagtgattagttctccccgcggactaccactttgctgccatacacgcagatgaaccggtgtagcgagtatattctcatccttgatgcgcagataagccagcggttttcctgtttcatccttggcatatacgggtttttgcaaactttcttcaatctgcactaccagcacgctgcgtccttccgcctgaaaggtctgcatggtataattcacttccggctggcagtacatttgtgctgccgcctctatcatatattgttcctcatcggagcgaactccggcgatctttccgttatcttttaccccgatcagcaaccgcccgccgtccgtattggcaaaggcggagagcgtttttgcgatcttacgggcatcggaaatctcaaacttaaagtcctgcctttggtgttcgccttcggctatgagcaagtgtatgtattccgtatctgtaaggggtttcatgcctgcaaaagtaggtaaaaaacgccagaggacgtttttttgtgcaatttttgcggattatttcaaaaaaaatattgtttttctgcatttatttcaagaaagagtgtatttttgccagacattattaacgaagtaatattaataagaaaaggattatgaaagaattagttgaaaaagttgctgaattgtatgcagcattcgagaaagatgcaaaagctcagattgaaaatggtaacaaagctgccggtactcgtgcacgtaaggcttctttggaaatcgaaaaatcaatgaaagcattccgcaaagcatctttggaagctgctaaataataagcacgcttactgaaagaattgaaagaccgtctcaatgagaacggtcttttttgttttatccggtacaaacatagggccacccgatattttcggtatacccatcaaataataagcaatttgttcagccgcaagataacgcggatctctttattaattctttttcaaactatatacattgtgtatatgatatatcttttatatctttgtaaaaaaagaaaggagttattatggcgacaatgacattagagaaaaaaaggaaaaatatagatttgcctgttgacgtattacagcgcttatcggttttggctgcttcacaaggtaagagtttgaaagccttcatagagcacctcttggtggtaaaagcaaattctatttctgtggaagttttagaaaatcccagtccaagtggcgattcctttttcgaagatgcagaaaatatggctgagatttcagcacgagtgaaagcacataaagcaggaaagacaaaatctgccataaagcttaaatcagccgaggaaatcaagagctttatagataatctctgagatgaaatatatcatagagtttgaagccaaggctatagaggatttagctaaactgaagaaattgggaaataaagcattaattactaaaatcgaaagattacttttggaaatagcagaacaccctactgtgggaactggacaagtggaagcattgaaaggtactctatccggttattggagcaggagaattgataagtttaatcgtattatttataccattgaagaagaaattgtgacagttacaataatttcggctaaagggcactatggtgataagtgataagttgtgtagtggatatgaatgaaaacgtcctcaataaactgaaaatactggcggagtcggccaaatatgacgtctcatgctcgtccagcggtaccgtgcgttccaacaaacccggtatgttgggtaatactgtcggcggctggggtatttgccatagttttgctgaggacggacgttgtatttcactgctgaaggtgatgttgacgaactattgcatttacgactgtgcatattgtatcaatcgtcgctctaatgatttgccgcgtgctacgctttctgtcagcgagttggtagatctgacgatggagttctatcgccgcaattatatagaaggactgttcctaagcagtggtgtggtgcggagtccggattataccatggaacgcttggtgcgcgtggcaaaagacttgcgcacagtgcatcgtttcaatggctatattcatttgaaaagtatccccggtgccagtcgtgaactggtgaacgaagcgggtctgtatgccgaccgcctcagcgtcaatgtagaaataccgaaagaggagaatctgaaacttcttgcccccgagaaagatcataaaagtgtatatgcaccgatgcgttatattcagcaaggcgtattggaaagttcggaggaacggaagaaacaccgccatgcaccacgttttgcccctgccggacagagcacgcaaatgattgtaggggctacggcggaaacagacaaagatatcctttttctttcatctgctctttacaaaggacctacaatgaggcgtgtctattattccggttatatctctgtgaatacgtatgatacgcgtttaccggccctgaagcaaccaccgctggtgcgtgaaaatcgcctgtatcaggcagattggctcatgcgcttttatcagtttaaggtggaagaaattgtggatgatgcatatcctgacctggacctggagattgatcctaaactgtcgtgggccttgcgccatcccgagcagtttccggtagatattaatcgggcggattatgagatgttattgcgtatcccgggtgtcggagtgaagtcggcaagattgattgtggcatcccgtcgtttttctaagttaggtttctatgagttgaagaagataggagtggtgatgaagaaagcgcagtactttattacttgccatgaactccccatgaagacagtgaatgagatgactccgcaagcagtacgtagtttgctgataacgaaatcgaacaagaagaaagtggacgaaaggcagttgttgcttgatttccacgactaagagagttcttttccatgaatatatttgtttttgataatactttcgagggcttgctgacttctgtttttgaagcctattcccgtcgtgtttttcctgatgcattgtttctggaaggagagccattgcctttatttcatgatgaagtcttcacggtaatcaccgaagaagaaaaggcgaagcgagtatggcgtggtctgcaaaagaaactttcttccggtgctctgtcttgccttgcccaatgttggctggcggaggaacaggaaactccgatgcttttgttccgttatatttgtaaggcgattgatgctccccgttccattgaaaccaattttgccgatccggatgtgctggaattctcgcgtatgtggaagcgggtggattgggaacgtcttcgtatgctccagtttattcgttttcagaaagctgccgacggtaccttctttgctgcggtagaaccggaaaagaatgctctgccactggctatcgatcattttaaggatcgttttgccgatcagccctggctgatatacgacataaaacgggcgtatggcttctattatgatttgaaagaagtacgtcaggtcacctttgaagaaggttcacgcgagggacatctgattacaggtatgctggacgaaagcctgatggataaagacgagcaactttttcagcaactctggaagacatactttaaagccatctgtatcaaagaacgactaaatccgcggaagcataaacaagatatgcctgtacgttactggaaacacatgacagagaagcagtaacaagatcattcgatttgttctactgtcacatccggccattcttgcataagtgacagcatgtgtccttcgtcattactccgcttggatttgataaccatagtcactatatacctttctgtatctccggaacctaatctttccattttgtaggagactaacatataatttcgggagttaaagcgatcggatacttccttaaggatatccttatttccggtagagaatgttatcatggagcttttcatccctacacttttgaacaggatgctgaggagttccaatcccgccagagtgagtagggtagcggctatacctattacatacattccagccccaactgccagaccaatgcctgctgtagcccatattccggcagcagtagtcaatcctctgacaatttgtttttgtaatatgatggtaccggcaccgataaaaccgataccgctgactacctgggccgctacacggctcgggtccagcgagacgctgttttctttgataatgtcttgaaagccatattgggaaacaatcatgatgagggcactgcccagcgatactaaaaagtgagtacggtatcctgcttctttggcacggtattctctgtccaagccgatgatggcacctaaaatgccggctactaatagtctgagtacgaaatcgaaatctaatgtcatattggctcctttctgtgttttaagttactgtactttttctttcggcttgccccgaaagaaaaagataccaaaaagaaagaggcaccggctacgtctccggagctactccggcaatggcagtgtcggagtagccccggaagtgcagccttgagtttttcttttggtatcttttcttttgtctcaagacaaaagaaaagtacttaatttataacccatgccctattatgcggcaccgtcttcttcggatcatagtgcattcccgcctgtgtcggtattttaagaacgtatgtacgcccgcttttgttttgtaaagaactatcgcgcagccatgggttggcatccttcagttgggcgtaggtaatacctttactcttggcaaattgtgccagattgtcgatacttgttgttacattgacctctgtatgggggatgaccggataaagatgttcccgtttcagtaaaaagccatagcgctgcggattactgatgatagctttagcggcaagcagacggaacatgtaacgggaagtttcttctacaagccaaaggtctacggcttgatctacgagttgttttttcagttcggaggagatgcggccttgtccaccattgtaggcagcggctacgcaaagccagttaccatatctttggtaggcatctttcagatacttgcatgcggcacgggtggctttctccacgtgataacgttcgtcgatattggggtttacttcaagaccgaattcgcgtccggtagtttgcatgaactgccacattccggctgctcctgccggactacgggcaagggtattgaggttactctctattacggcgaggtatttgaaatcatcgggtacaccgttttccttcaatataggttctatgatggggaagaagcggtttgcacgcttgatggtgagcatggtggtggagtgcatataggtgaacgacatttgttcgcggtccatacgttcacgatgatcgtagcgcgtcaggtcaatttcctgtccggcaaaggtgattttgtccggtacggaaggggaggtgacacagtagggaacttcggatttaacggattgctgttcagggtctatcgtgctgtgcccaaacagaaatggaagtgtggcaccggcgcatagagcaactgaggtaactatcaggatatgtattgagctttttttcattttcaaaagtttgtttggttcgaggtcgaatatacaatatttacgggaatgaggcaagaactatggtgtctttacaacgaatcttagttctttataggcaatctttcccataaccaccgggggatcattcgccagaaaaagacaactacacggtatctgccgtcgattacaatgacccgttttttccggttcaaggcacggacgatactcttcgctacctgattggcttgcatcagcatggggaacttaccacttttcagtaagtcggtggcgacgaaaccagggcgtatgtctgtgaaatggatatttaagtgttgcatccgggagagttgtgccaaggcttcgatgtaagtattctggaagcgtttcgttgcggaataggccggggcgatgcccaatcctttggtgcctgcaatggaactgatgacagcgatgtgcccacctccttgggttttgaagtgattgaaggcggcggtcaccatgcgggtgaatccttctacgttggtacgggcggtattaagttctatttccggtttcaggtccgggttctggctacctatgccggagctgagaaagaataaatccatgccacctaacttccggatgagtgtttccagcagggtgggggcattcgcatctgttacgtccagacgttgaatttcgatttgctcgggggcggtggcttgcagcttttccaatgcttcttcccgtcttccggcaataccgatgtgccaaccttgctgaattaacagtttggcaacttcttctcctatgccggaggtggctcctataataatggctcgtttcataattgctgtattagtagtttgttaattgcatgtgcaggatgggaaagggcttgccttgcgcatctgtttcatcccgacttattacttcaaagcccctgttacggtagaagcgaaaagcctgttcgttttgttcattgacatccactttacggaaagctcgtttgtttacggcaaactctaataatgtcttgccatatccttttccctgttcgttggggtggataaacagcatttctattaaatcgtcgcttagtcccagaaaaccactgatgcggttgtctttattctttataatatagagttgcactgcggggaaataaacgttctgtaccagaggtttgtagtactgaatatcttctgcactcaagaagtgatgcgtactgcgtacggatgcttcccaaagctcagagagttcgggataatctttctccgtggcgacgaagatatttgtaggaagattgtttgttttcatatgttttattgtccgatgacggttgctactatttttcttccaccgccacgattgcggaattcacagaggtatataccttgccagatgcccatattcagtctaccgtcagtgataggtatgctgagactattacctgttagggtcgatttggcatgggcgggcatgtcgtcatctccttcacaggtatgcatatagtagggttcccgttcttttaccaggtggttgaagatggcttccatgtccgtctggacatccggatcagcattttcattgatgctaagtccggcagaggtatgcttgatgaacagatgtaaaagtccggcttgcggcagacgcggcaggttacgtattatttcatccgttatcaggtgaaaaccacgtgcatggggacgtagggtaaattctttttgagtaacaaaactttgttccatttttatatatttctatgcgttattatttgccaatatgatttagtatgaaagtttttctattctttaggggctttatcaagtgatgatccgcaatacttacagaactgcgcactttcttcgtgtcctcgcctgtgacagttggggcactctcttgctacattcttttcatgtcttttcatcagcgatacggaaactatgccggtgggtactgcaataatagtgtaacctatcagcatgacacaacccgaaaggaatttccccagggcggtgacaggagttatatctccgtaacctacggtggtaagggtgacgcaggcccaataaatactgttgggaatattgctgaactgtgtattgggttttcctccttcaatcatgtacatcagtgtcccgatagatatcaccagaataaccacaaacataaagaaaactgcgattttcttgctactgtctcgtagtgctgtcagtagcatttgcccttctatccagaagttgaataacttgaagacgcggaatatccgtatcaggcggaatgcccgtataataagcagatagcgtgccccgggaaacaggaaagcgagataaagcggcagtgtagccagcaagtcgatgatgccgaaagcactgaaagcgtatttggaaggtttgggcgaacaatacaaccgggtgatatattcgaaagtaaagaaagcggtcagtaaatactccataacaatgaatggagttttcagccataccggtaatccttgcaggctttccaggataacaagtcccacgctaagcaatatgcaccagatcagggtaacgtcgaatagcttcccggcaggtgtatcagcttcgaatatgatgacatatagttttcgcttcaaagcctgattatgcatcagtgctgtgaatttatctttcagtttcatctttcacaatgtttgttacaaaagtaggaaaacctttccgaatgagaaaaagggtacttgactttttgtaacttgctggaatatggagtatatttgttacctgttttcacgatttaaaagtaaacaaccatgaatcgaataataaccttcgttatcggggttttgttcatcatacttaaaataaagagcgtatgaataaagtatgtgtagtaacaggtggagccgccggtatcggtcgttgcattgtcgagatgtttgcagaatcgggatatacggtgtatttcattgataagacacccgaggcggtggaactggcggaaggaaagatgtcggaaagagggctttcggttacaggctttgtcggagatattgccgaggaacagacgctacaggattttgtagactttgtcttatccatagaagatcagattgactgtctgataaataatgcttgcctgacaaatggaggaatattgagcaactgttcgtatgaagacttcctgtatgtgcaacgtgtgggagtagcagctccttatttcctggctttgtcgtttaaagactatttcagtggtgcaggtgctattgtgaatatttcttctacccgtgctttccagtcgcaggccaatacggaaagttatacggcagccaaaggtggaataacggctctgactcatgcacttgcggtcagtctttcgggaattgcccgcgtgaattctattgctcccggttggattgatatgggaagctatcatgaagaggattatgtgccggcatatacggaaggagatatcatgcagcatccctcgcaaagggtaggagaaccggccgatatagcccgtgcagttcttttcctttgtgacgaacggaactcctttatcaacggggagaatattacgattgatggaggcatgagtaaactaatgatttatcataatgattatggttgggattatcaaccgtagaaactattaaatataaaaagagaataatggaaaaagtaattatcaactcgtatgaggattttgaaaagctggtaggtcagcaaattggtgtttccgattatgtggaactttcgcaggaacgtatcaatctgtttgctgatgctacgttggatcatcagtggatacatgtagatacggaacgtgctaaaacagagagccatttcaaaactactattgcgcatggctatcttactttgtctatgttgccgtatctgtggaaccagattattgaggtgaacaacctgaagatgatggttaattatggtatggatcagatgaagttcggtcaggcggtattgtcgggacaaagtattcgtttggttgcgaaactgcactcattgacaaacttgcgcggtgtggcaaaggctgagattaaatttacgattgagataaaagaccaaccgaagaaggcgctcgaaggtattgcagtgttcttgtattatttcaattaaaattctttcatcacaaattacacggatatttacagatttaataatgaagtttcaataaagctcttcttcttaatctgtgaatatccgtgtaatttgtgatgtatttttatttcttcctgatatattcctgccacaaatgccggatagccgctaccggatgatataacaacattcttggccctgcccatctcatgatttctctcatccgttcccgcatctccggtttgtaacaatgtatggtacagagtcggcaagtacctttcttttctccgaatggacaacgtgacaaccgtgcatgtgcatattccaacacttccctgcattgcgggcacaaagtttcgttcccctctttcttccggcagtagaggcgaatcatttgttccacggtttgtttttcctgttcgatgcgggacatattatttttctcgggctagtcggacaacctgtctgataaactcagtttttccttttgtataagcatctctgtcatgctcataaacctgttttaatttcagttttaactctccatactcatgagcaagagccggatgagattgaagatagtggcaaaagatcggctcatcccagtcacctgcatagcgcacatgtagatgataggcttgccccctgaatccctgaggggtatatcctttcatgagcatcatgtgaggtgcagggctctccggttgatgtgtatagatataacctgtactttgaatctttacgattaattcttcgatgttagtttttccgtcgatctctaataaaatatctattgtgggtttagctatcaaatctttaactgccgtgcttcctatatgtcggatgcggacaatgttttttccgacaatggcacggagttgctgttcttccagtttatataatctttcccaatctttctgatgttcggtcaggatgatggggaagagttcccataactcttcattggacatgcttattagttctttcataacggataatacctgtatagcgaaagatggttatatcagtttttttgccagcgtttcagcttcggaaactcttgcttcatcatcgcaatggcttcttctttagttaccttctgctccgagtctttattgaattcttctacaaactgggcacaatgttctatcatttcatccatggtgcagtcttgcgcgaatttaccttgctgatagcagtaagtgcaataatctgcgctgaggctaccgtcagcatttgttccgcatacttcatcggatgtgagcggcattccgcaactttggcaaaatttcatttccataatctttttgaattagagtttgtacaaatatacattcttattttaattgcagcaattttttcagtaaaccttcattcaacaggtgcacagtttcgaactttccattatagaatacagcccaattattaaagatgcaaggcagttgtttagctttctctaaagtatctgtctctaccaaccggagaggtatttgattgttctcgcaataattgtatatctgttcgatacaattgggaatatagggacattgcacaccgtaatagatggtcagttctttgccctcaatgctctgtttccgcacgtttgatgtgaattgcggttgggtgccgtcaaaggaaagagctaataattcatattcgtcattgatggtatccactactttgaagccatatttcaacatgaacttcttttctgataagaaaggtttcttctttttggaagaaaggaggcagatgccggattttccttgcgcttttgcgtcgtcgatgcacgattgtaacaattcctttccgtatccctttcctttgtaactgccggatacccacaggcaataaatatagaaataattatcaccagttacgagaatccaggctttttccaacggggcatactcgatgaacacctttccctgcgcatccagtttgcggaagatgtgtccttctttgatacgctctgccagccagttgcgtttatcgtttacgccggtctggtgttttttgtctgcaatggcgcaacataggtgttcgctcattacgttctcaggggttagtgtgatgaatgccatacttttattgatttagacgaatgggtatatagattttagtgatttgttctgacggatttttcgaccacgtgacgtactcttcaaaagaaagcgcatttcgcaatctttctttctcttttgaataaatataagtgtaagctcgaagcaatcctttataacttccccgataggtataaactacatacggtccattctctatcgttaaactaccgatggctcccgatggttttatcttttgtggtacggaagcgcaggcatagaaacggcatcgcttcttttgcgtaaccgtgggatcgtcgaaactgatgccgaaccagcgggtagcggacgattgtaatgtacattctttcaggaaatcgcaaagacttccccaaccgcgttcgtaactttccttctctccatacggaccgataatacggatgtatgccacatgcatggtagggaggagcagtacttccggttcttgcaatccgattgaagaaatatcctctgccatagttgtttctgtagtgacgagcagcaatgtatttctgaatgctatcggtgagaaaccgaaataccgtttgaatgctttggagaaagattgcggtgtgtcatatcctaccttttcggatagttcctgaagggaaagatcacgtgtttgcaggtacatcacagccctttccatcctttggcgggtgatataggccgagatagtctcttgcagatatgacttgaaaagccggtgaaagtgatatacggacatgttcatctccattgccagcatttccgaagataatgtctggtgtaaatgggtatgaatataatcaatagcctggttgattaattcctgatgtccgtatgtcgtttcttccttcatttgtcaggttttggcacaaaggtaggcgaaaccagcggaagaagaattatccattcttgctaattttgagataaaccatatctttcagaagctttccatcttcatacatgggatgatcgtagttgtcagtaaaaaagttgggtatgcggtgcgagtaggtaaatccgcattgtttgtagaaatcctctgtgtacgtatcttctgctgtacctaccaatagcgtatgataacgatctttgtagtgctccaatagaaattctatcagccgttttccatatccttttcgttggtagtggggataagtggcgatgttcttgatttcatagactccgtttccttcatctgttatcacacacgccgcctttaagtcgccgtcgtagagagcatacatttctccccgttccaggtagagatctatcatggactcttgttcgtcggcaagtagcagtagttcgaggaactcctttttgttctttaaaatagggacgatgtttaccattcgtgtagatttaattgttcttgaatcacctcaaaggtaggcaattggtatgagaaagacaaattctgctaccaagttgaaaaacattattccgaaatttgctacttataattaatttctgttctttcgtacaggaatttatggttgcccgataatggtctatgctttttagggagagcgagttttccaagtcaattcattggggggataagattaaaagtagtcaacctatgtaagaagactatgtgctcaatatcagtagattatgattctcagttattctcgctatattgagagtcttttctcaccgtgatgagtatttattctcatcgcattgagaagttcttctcatcgtattgagaatactttctctttacgttgagaaaatcttcattataggcatcctatttccgactgataagtattgtattgcaaagtaatataggttatggataaaacatcctttggagaagaagtatatagcgttgtcgcctccatccctccgggacgtgtgctgacgtatggacagattgcttatcttataggtaagccccagtgttcacgtatggtggggcaggccatgcataacgcacctgaggaacaaaatctgccttgccaccgggtagtgaatagtcagggacgactggcccctttctggcccgaacaacgggagttgctggaaaaagagggtaccgtctttaagaagaacggatgcgtagatatcaaggcatccggttgggaaatactgaaggaggttatttcttagcgaatatattgatgagcagcgagcaacttgtcagcaagatacctgttcccaccactcccgtccagccgaaccattgccagaaggttccggcaaggaaagttccggtggaaccgccaatgaaataggtagtcatgaaaatagtattgatgcgattggatgcctgcggacaaagggcaaaagcacttgtctgattgctgagctggatgcattgcatccctatatctatcaacagaataccggctatgatacctgcataactatattgtcccgcatagagcactatccatgcactgattatcagcgaacatcctatataagtaagccgtttcaccccgaccgtattgatgaatcttccgatggaagaagcggtcagtgccccggctatgccgcaaagacccaacattcctatgatattgtttcccgcaaagaaaggcgcctgctccatcttgaaagccagacaactccacatggcaaggaacgatccgaacgagaaacctgcacgcaacgaagctatgcggagttggggatacttcttgacgatggaaaacaaggatttcatcagtccggcataacttccctgataattggaaggaaggtccgggagtatccttattataataagcaaacaaacgaccatcaatcccgcggcaatgaagtagataaaccgccagcccatgtattcgcctacaatgccgcttactacacgcgaagcaagaatacccgtcagtagtcccgaaaggataatacctacattctttcctttggtttcgggagtggaatattgtgccgcaaggggcatgaatatctggggtataaccgaacaggcacccgtcagcagagaagcgaacagtatcaggtggatattgggagctaaagcaatggtgagcagtgagactaccagaatggaaatatttacgaggataatatttcttctgcggtataaatcgcccagtggaatgatgaacaatagtccgatggcatatccaatctgcgagcacatggctatcagattggcggtgaactcactgatgttcaggtcacggctgatacggttcagtagtggttggttgtagtatatgttggctaccgttacgcctgagatgatggccagcgtccaaagcagggacgagggtactccttgattttcttttagttccaatttcatgccgcaaaggtagtaaattcatgaaaaagaaacatgcataatgatcaatgattcatatacaggggcatcaggcgatggtaggctttcagatatttcctgagtctggtgacttctttttctccgatgcagggcatgcggcgcacatccatattatccgtcaggtcgtgaatcttaacggcaacggctatgggattggaggcacatctttcgacgtattcttcgtaatcttcctcatcggaggtctttgtgacacaccgcacggcttcaatgatttcggcagagaatccttccttttccaggtcttcgaatgtccattccgtatcttctacaacgtcgtgtagaataccgacaatcctttctttcagattccgtcccatattcattacgcggatgggatgatgcagatattcctgtccgtatttgtctttttgtcctttgtgggcttcggtggcaatagcgatggcatgtgagagaagatgattgtccataagattttttttagaattgttcgatacaaagttactgaaatctgttattaaatataagagaggcttattattaaaattgtatattaacccaataaatgaaacagattatgaatatagaacattttccggagaaaaaagtttttcagaccgtagtcgatggagagactgcccgcctgatgtatcatgtagctgacggtgctttggatgtgcgccacacgattgtacccggtgaaataggtggtaggggaattgcctctgctttagtaaaggcagcctatgattatgcattggctaatgaactggtgcctgtggcaacctgttcctatgccgtgaagtggctggaaaggcatcctgaatataatggaaagacgggaaaggattatgcgggggaggggacttgtgcattatagaaactcaaggtcgtcatatcttgattttgccatcttcggatttttctctatcttgcttccgtttttaatcattcactaaagaaaaacagaatatgaagaaatatataggagcgcacgtaagtgcgagtgggggagttgagatagctcctgttaatgcgcatgagataggtgcgaatgcatttgctttgtttacaaagaaccaacggcaatgggtggccaaacctctgatcgaagaaagtattcgcggatttaaagacaattgtgagaaatactcttttgatgcccgttatatcctgcctcatgatagctatttaatcaatctgggacatcctgaagaagaaggactggagaaaagccgtgccgcatttctggatgaaatgcaacgttgtgagcaattaggtctgaagcttctgaatttccatccgggcagtcatctgaataaaatttcaatagaggaatgtctggataaggtggcagaatctatcaatatcacattaagtaaaacgaaaggagtgactgctgttattgagaatacagccggacaaggaagtaatgttggtaatgagttttggcaactaaagcatatcattgatcgtgtggatgataaatcccgtgtaggtgtatgcttggatacttgtcatacttactcggcaggatacgatatcgtaaaggaatatgataaagtgtttcaggagtttgatgaagtcgttggttttaactatttgcggggtatccacctgaatgatactaaaaaagaactgggtagccatgtagaccgccatgacagtatagggaaaggcttgttaggcatagacttctttaagcgttttatgaaagatgaacggtttaatgatatgcctgttattcttgaaacgccggatgagagtttatgggcggacgagataaagttgctacgtagctttgaagaatagatatgcggacgacgcggactaaacagacgaacacggattttcttaattcataataagaagtccgtgttcgtctgtttagtccgcgtcgtccgcgtatccttttattgatttaccttcacattattccattcagatgacgggataattgacttgtcatactcaccatctttcgctttaatattcagattctcaaatttgaaattcgtcagtttgtactgctcggatgcacttacgttgaaaaatacgtcacattcaaagtctatattacgcattgttacatggtccgagtaagacatcggaatatctttacggtctttcagatcaaagaactgagtccatggtttgatgtataggaagcttttggcatttcctttaatatcctccacaaggatatattcataattttggggagtatcggcacgcatcttcaaccacaacagacggcttgcctgattgatggtacaacgacggagaataatattgcggttatggatagactcgctaccgcaagtcagtgcactatggcagaaaccgtacgtacaatcttctataataatattagtgttacttccgttgttagaatccttatcagcccaggggccttttccacctttaagagcaatagcatcatcgtttacagaaaggtagcagttcttaaccaacacattattgcatacatcaatatctatggcatccgtgctgggtgccttaacaggagcagccggagagaaaatatatagacctaatagcttcacattgttacatttgtaaatgtgtgtcgtccagaaaggagagttgatgaggcgtacgccggaaagctgtacatcattgctattggaaatgtgcaccaggcgcggacgcaactcatccatattcgtgcatttcggaataacggtgcggcgtaaccagaaagatttccaatagcgtagtccgttgccattgatggttcccttaccggaaatggtgaaaccatctactttgtcggcattcaccagtgcggcaaagtatttaagtgattgcccctcgatgcgggtgttgattatagggaagttgctgatatcatcgctacctttcaatactgctccttcttccagataaaggtgcgttttaggcttgaaaaagagtgcaccgctcagataggtacctttcgggatgatgatcacaccgccacctttggatgatgtctggtcgataaccgcctgaattttctctgtttgaagtaaggtgctgtcattcaccacaccatgatcagtaatcttatatttaccgccaagggtttcgatatttacaatttcgttctgtctgaaccagtcgggaataagggtaccatcggggaatttctcttgtgcaaaagatggcaggcagaaaagcaaactacatactaaagttacgaatttcatggtctttatcattaattgagttaatagtgtcttgatcggatcgatttatccgtttgcaaaaatagggattaaaatctacatgctgctcatgaggataagcccatttcctaagttatttgttggtttatataggctttttgattcttcctttccatacagaaaggaagttaactcgtcaacttttcctctatccgagctttttgaaaaagcaataatcagaagtctgctttttccgtaatacacatggactgcccgttgacgggatgggtgaactctatggattcagcgtgcagatagagccttttgtctttctttccataaagttcgtcgcctatgatggggcaatgcagtcctgacggatgtgccgcatgtacgcgaagctggtgagtacgtccggtatggggataaaaggctatacgtgtatatttatctgtacgttcgagaacctgataataagtgatggcaggcttgccgtattgtgtgtctaccatttgccgggggcggtccaatggattggggcaaagcgatagttcaatagtgccctcatcttccgggacgatgccatcgagcaaggctatgtacttctttcggatactacgattcttgaattgtgcctgtaagtgttggtgcgtcttcttatctttggcaatgattaaaagtcccgatgtagccatatccagcctatgtacgatcatgggaccctctgcttccggataagcttctcttgccaggtcgtatatagacgtctgtctctcttttccgggtactgaaagcattccggcaggcttattaataatcaatagccattggtcttcataaactatattcaatttttcattgcctcgttccgccccctgttgcataggatttgcttctacctccaatccctgcaacatgtgccggagaattggttcgcatttgcccttacaggctggatagtaataaccgtgatgccgtacttcgtttttgggagaattaccccaccagaattcggccatggctatcggtttccaatgatgtagataggcttgttgtaacaatttaggagcggcacattcacctgcaccggcgggaggagtcttatgtacggtttgctcgaatatgtcgcataaagttatcgcttctccccggtagttcaacattctgaattgttcgaatagttgttgttgcaaggcggcagagcggactttacgttctgctttcagctcttgtatttgtttttcccaattaccagcttctacctgcaaggaagctatcttatctttccaggagcgttccaaccgtttatattctgccttctggaactggctctctcgtatcagatctgcttcttcctttgcatcaagctgacctgtctttctgagcaattctcttttatcttttgcttctttcaattgtatcttggcaattgacaatgcatcttgtgcagattgggtggtttgggtaagatttgatcgtaggtcaatatatttcttatcctcttccaaccggcggatacgacggttgatagcggatatgttttcttcttctattttgaagaagccttgaggttgcaataaatcgtacacgggaggtacaaaatatggatgtatattcttcccggctaatatgcccgaaaaggcggttaaataacctatgcttccatcttcggtttgcacaatcagcactccgaacattttcccctggcttaattcctcttgccagtcgctttgcttgctgaggtagttttgtacctcttccgctgccattacacacaatggatgaggagtataacagaaagggtaagtaaacctttccggaagtggaatatcgctgattgaagtagtaaaacggtgcaacataatggtgcaaagatactacattctttgggtatctgtgaagttatccggcagaaaagaattcctcgctttcattatggtagggtaggaggaaagtgaaccggcttccttttccaatctctgaggccacactaatcttcccaccgagtttttccgcaattaccatgctgatggaaagtcccagacccgtgccttgaacaaattcatcttgtttgtagaagcgttcgaatatcattcgttgctcttctttcggaatacctttgccggtatcttctacgtaaatggagacttcgtatgttgaaaaatcaatttcataacccagtttgatgtatcctgatttggtaaacttagtggcattattcaggaagttagtcataatctggctgaggcggttcacgtccgtattgatgaagaatgcggcatcgggcacttctttgataaactttatttccttgggtatcaataaggaatgtgtcaaatacatactatccacccaattattcagattacacgttgaataggagaaagtcatgttgcccgattcgatacgggagagttccagtatatcattgatgagtttcagaagcaattcgcaattggtattgatcgtattgatgaagtcagctttctcttcatcgggcaggtcgtcttcgctgacgagtaagttggagaaccccacaattgcattcagtggagtacgtatttcatggctcatattggcgaggaaagattgcttcagttccgcctctatcgccaggtcttttgctctcatgagttcctcttctttgtccttgaagtgttgcacattggtgattaagcctataatggaggctgtttcggccattgcctccgtgggattgacataacggagttcataccagatataccctttaccattaaagttgcaccggcattgggtgtgcgttttggaatccggttggtttttcacatgataaaacgtgttcaacacatccactctatcttccggatgtatcgcttcggccatttcttgtagggtgaaagtacggaaaggcatatccagatgctcaaagaattctttatcacagatgaaagcatttgttttctctatgtatttccaggcatagatgttgctcttttcgagtgatagcgataataattccttttctctggttagttccctttgggcggtgcgctttcttttagactctctgacatagagaagtagcggataaatgatgaaaaaacaaatggaagagagagccagaacaatgatacaaataaaaagaggcttgtacttggcttggaaaggtatcttgattacaatataatcttgtggatgttcttcaacttcaacattggtttctgttttctgaatatcttgggattcagcgtactggggttctaccgcatgcatctttgtaaataggacaaagaagattagaataatcgaaactcttttcagtagctgatagcgttttttcatagctgaagaataactcattttgcaaatgtacatgaatatttttaattcttgcacaaataaataaaaatgtgagaattagctcgttttatgtccgaatggcagattctttccatcttaaaaaaagactattttaatgtaaatcttatttttttattttatatactgatttttcgcaattcacggcttagccagatagtaacattgatggtcgtataaatgtccatcgtaggttaactcggcctgatggagagtgccttcatagataaaaccgtggcgtttcaaaagctgttgcgagcgctcgttatggggatagcaatttgcggtgatgaggcttagttggagggtgctgaatccgtaatcgagaacagattgcaccgcttccgtcatgtagccctttccccaatgggattcatcgagccagtatcccagcatgcgtgcttgcgggttttcacgcttgggatctgggatgataccgactgaaccgatcaaacgtccgtcttcttttaggatgatagcccatatcccggactgggatataaatacggaacgaaggatttcttgtgattcttctaaggaaccatgaggtttccagccggcattgtttcctatatttgggttttggcagcatttaaagaaggcttccgcatcactttcccggaaggggcgtaatagtagccgttccgtttcaatcggagcatccggttcattactggtttcttccttcctgtatacacattccactcgattgccatccggatcgagtatgacgctttcgaaatatccatcgcccgaagtccgcggttcgccggctatggtatacccatcgctacggagttgctcagtagtgcggagaacgtcttctttgctttggaaagagagagcaaagtgcgtgagtcccaacttgttctcttctatcggagtgttttgcacatctgtgcggctcattaattctaatgccgcgccatcatcaaaatagatgaaataggactcgaaaccctttttcggattgatatatttttcattgcttgttccgttaaagtagcggatataaaactctctcaattcttccagacgaaaagtccagatggcgatatgatgtattttcatgtgatataatagtttgaatatctgttctttgtagttaattaaaaactacttttcatgcaaatataatgattattccttataaaagcctacctttgcgccctaattaaaagaaatgatgacatttaaacagatgaatatttcggagccggtgtgccgtgcgctccttgaaaaaaactattctactcctactcttatacaagaacaagccataccggaagccctgacagggcgtgatctattaggactggctcaaaccggaaccggtaaaacggcggcatttgccatacctatcatagaacaattgcttgccgaccctacatctcagcagaaaggtgctccacgtaagattcgtgctcttatccttactccaacgcgtgagttggcaattcagattgatgaatcgctggcagactatacacgatataccacgttgcgccataccgttattttcggtggggtaaagcagaagtcgcaaactgatgaattgcgcgctggaacggatatcctgacggctactcccggtcgtttgctcgatctgatgtcacaaggatttatccgcctcgaccatgtgcggcacttcgtgcttgacgaagctgaccgtatgctcgatatgggattcatccatgatgtgaagcgcttgttgcctaagctcccgcccaagaagcaaaccttgtttttttcggctaccatgcctgatagtattgaccgcctggctaaaggtttattgcgcaatccggcgagggtggaagtcactccggcatccagcgtagtggaaataatcagtcagtccatctatcgtgtggaaaagcctcagaagaaggaattgctggcacaactattactcggagaggccggacaccaggtacttgtattttcgcgtaccaaacatggggcagataatatagcgcgctatttatcacgtcgtggcatcacttgtgaaagtatccatggagataagtcacaaaattcccgccagcgtgcattgagtaatttcaaggaaggtcgttccaatgtaattatcgctacggatattgcggcacgcggtattgatatcaaaggtttggatttggttctcaactacgatttgcccgatgtgccggaaacctatgttcatcgtatcggacgtacgggacgtgcaggttgcgaaggacgtgccattgccttttgttcgggtgaggaagtgccgatgttgcgtgaaatagagaaacttacaggtatcaaactggagcaacggaaacatgatttaccgcctttggaggagacgaaaacagctccggttgccaatgttacacgaaaggtacaagcgaaagcaccggcagagaagcaacaaggcaagcagaacaataagaggcgggagaacagaaagcctgccgaacccttgaagaatactcagcaagcaacggttgttgctgaaaagcccaaacgtcataatcgtccggcgaaaccgatattagctcgggaatcgcaacaaaagcaatccgcggataaaacggagcaagcatccagtcgttcggcaaagttgcgttcgcgttatgaaaattatgaatgattggctatagtttatctaacgattaaaggtttccattggtggagttggtttattctgggaaagaaatgaactaaatgctgataataatttaggcgcggattacgcggattacacggattaaaggctgcgctacaacattgtactacagaaaaaatccgtgtaatccgcgtaatccgcgcctaaaattatattcataacccgaaagaaagaaatagcttccgccaacggattaaagttgtatttcttaataaacgaacttgtaaaataaattagcttttatgcttcttgttttgttcgaaaagaagaaaaaaggtgatagttaagtacatagaaaatcttttttattcttttaaaagtttgtatattagcgccttgaagatactcgaaaatgtattttatttttgttttaagtgtctctaaccctaaggtgtaaaaagtaatatgatcgaaaagaacaagagtttaagtgtatttctccttcatttcttagagcgtttaaatggatgtgaatccattgaaaagaaaatcacggaatcattgacggatatttgtactttctataagtttaaaaaaggatttgtctatcagaccgatggttttcgctatttcttcctgaaagaaacgattggaaatgaagaccattctctgaagcgtcgctttgagatgagtgaaatgaccaaaatacattccgatcgtatgaaggtcaagaaccgtcctttttatgccagtagaaacgatgacaattccttagttgacattgacgttctggatttttatggaacggactccttgttggtccgtcaatttgaagatagtgaaggaaagattatcgggtttataggatttgcggatagggaggatacaactcctttcacggatgaggaattgcaaaccattcatctattgctggggtcgctttccaaagaaatagccgttcgtgaatataaagaacgggaagtgcgggcaagcaatacgctgggtagcatcatgaacaatatgggagtcgacatttatgtgaactcttttgattctcatgatatgttgtatgccaatgcgtctatggcggctccgtatggtggcattaagcattttgaaggaaagaagtgctggcaggctctttataccgataaaacgggcgaatgtgagttttgtcctaaaagacacctgatcgacgaaaacggtctacctactaaagtttactcctgggattaccaacgcccgttcgatcaatgttggtttcgtgtattcagtgcggcatttccctggatagacggccagatggcacatgtcattaccagcgttgatatcgaccatcagaaaaagatagaagaagaattgataatagccaaggataaggccgaaaatctggatcgcttgaagtccgcctttctggctaacatgagtcatgagattcgtactccgttgaattccatagtcggtttcgcaagtatgcttgttgaggaggaggatagagaagagcgtcagggctatattgaaatcatgcaagagaacacggaattgctcttacaattaatatccgacattctggatttatccaagatagaggcgggaacgctcgatttcaacatgggatatttgaatatcagggacttctgtgaagatatattgcgtggttatgaaatcaaagaagataagcctgtaccggttgtgttggcttccggtctgcccgattatcgtatctatacggataagaaacgcttgatgcaggtcatcaccaactttataaataatgctctgaaattcaccagtaaggggcagatcactctggagtaccattttaaagagggtaccaatgaaatagagttctcggttacggatacgggtatcggcatcgcaccggatgcggtggggcaggttttcgaccgatttgtgaagctgaacacattctccaagggcaccggcttagggttgtccatctgccggagtattgtggagtaccttggtggcacgattggcgccgaatcggaagtaggagtcgggagtcgtttctggtttacgcatccttgcgcggaatcggcctgattatggagtagtctattatttatgaactaaatttataagctaatgagaaacaaaacgtggaagtatctggttgttacatctgcaatattcgtgttatcagcttgtggcggaggcacaaaaaagcaagtaaatgaggatgtaagtatggataatgtaaatggggtgtgcgatggcctgaagacattgcaactggatgaagtgaaagttacctggatacaggataatgcgaaagagcgcctgatggaaagaacgctttttgcggatgctgacgatagtctgatagagagtttgaaactagaaggcggaataccttcgtccatgagtgcttttctggtagaaacgggtggaatccgaatcctgtttgatacgggcatgggagcaccagatagccgtctgctatcgggcttggcttctttgggaattaccccttccgatattaaatatttgtatcttacccatttccatggcgatcacatcggtggaatgatgaaaggggatagtgttgtgtttcctgatgttgaagtgtatgcatcgaaagtggaatatgatgcctggctcaagatgcctgccgacaggaatgcgcaagtgttgaaaacgatgaatgcttataaagaccgtttgcatttgtttgagtttggagaaacattgccgggtaatgtcgttgcgatgaatgctgagggacatactcccgggcataccgtgtttcaggcgaacaaattgttggtgattgccgatcttatccatggagccgctcttcagttagagcatcccgaaatctgcgctacgtatgatatggataaggagaaggcggtgaaatcacgtaagtgtttccttcaatatgccaaagacaatggtttgacgatggcaggtatgcatttgccggctccggcattcaaatagtattttccaaattggtattaacagggggtgtttcttcaccctcttttgatttttccaaagttttcggacgcttcataggcgagggcttctttccgtatttacgttctttttcccaagcggctttccgggcttggtatgcttcatattgtttttctaaataattgtcggccataatgtaatcgtttaaaataaagatgcttatcgttgggtaggcaatgagaactcttgccagtcgtactcctgtccgttttcatcggctacggcaacgcgtatgatgacttctcctgtctttatccgttctccggcattgatgctggcggtatatttcacaccttcatgaggcttaatctgctctatcatgaccgagggtgaaatatagatacgcttcatgcccgtgatttcgaccactaccggtactacgttgaaagctgttctgtttccttcgtttatgatttcgaagatcactttacaattttcgcctgagttgattgtgtggtcgcgattggcgtcaatgaaacgtatattatgtattctcagattctcgatagctgatgaatattggggttggggtctggacggttgagtcctttctacccggtagctatattcttctgtctgcttgggggcggtagcggcatttgcgatggctgctccggcgatggttccgacgatggtaccaatggcggaaccccggtagccacctctccatcccctgttactttcgccaatgaggcctccgatggcgcctcccacatttcctccgatggatgctccggccaacaccgcgcccgggtcacctgccgccatacgattggtgctacatccgctacataggatggctaatgctaatattcctatgaaatatgtagtaattcgtttcttcatatctgaatcctttaacacctgcttgataaccgttggtttgcctatctgacgagtacccattacgacttgaatgaactttcgctgctctttaagccgattcataattacttgatattctgatcttttatacatagggttacattttactcagtgcactaagtatttttactcaatacaaagataacaaatatattaaattaataatcatgtgtttacgaagaaaatccgatttttgcaattagacaagtgttctgtaatacctatgtgatcagcgcaacttgtgagaaccagatagttggaaaggtgagtttattgaataaaagttctttagaatattgtggaattagaggatatagtatatttttacgagaaataaaatgtaagattgactatgagtacttttcgttccatagaagaattagtgaagagtcttgaacgcgagaaagaactactgaaagaaatgtttgccaaacggaagtcgctttcgtttcgttatgattatgcgcttgagatgacagagtataaagaagagcgtgttcgttatctgattgactacggtgtaatacgtgacacgggcgactttcttgaaatggaagatctttatctgaagttctttgaagatgtgttggaagtgaatgaggaaatcaatgtatcttttgtacaggactatcttacacgcctcaatgaaaatatagattattatctgaaagagaataatgaaaagcgcaagtacaattatcagcgtgaagtgaaacgctgtctgaaaaacattgctcttaccactgtccgcaatgtaatggacctgaaaaggaacatggataatacttacaagaatgaacccaactaccaaataaaaaaagcgaagttgatgagattaagcgaaaagctcaagaacatctctttgctaataactaaaagtgaggagctgattgataaccagcaaccggtctttttccgcatagccatggatgtgcaaatgcggaatgtggtgagcgacgtcaaactgcaattgaacgattcttatcataacctgctcgaaattcaccggcagattgtccattacctgaacttgatagactatcagaaccgtatctttgagaaaataaggaagctgaagtatctgaaagaccagttcctattggaagagaacacgactattcgacaagtggtttcgcaacgtcatccgttatggatggaacctcagacaaactaccgcataaagttatcaatagattatctgcgaacttcggatgaggctttccaagccgtcaggaagttggtggcacagcaaaagaacaggaagcacggtccgaaaaatctggctgaggctatcccggaaggatatctggataatcagtcgcaacggattgacgcgataaacttgcgggaagtgtacaatgcttttacggcatccgggatgcatctgtttggtttcgtgatgaactatcgttttcgcaaagaagtatcccggggagataaactgatttatttttgtcagttggcttcccaatatgctgatgaactcaattttatggaaagctatgagtgctcgggcgatgtggaatatcctttgatttacgtcaaataaaactttttgaacatgaaatataccgaagagattttcaatatacttagtaaaggagggtttatttcctcgaacagtatttctactcaggtgaagcgttactatgatgctattgaagaagaattgcccgattattatgaatattatcggggaatcggactttatctggaagggggagacggttactatcattttacgcgtaaagaggcgaaagtagatttggagcgtaaattggaagctaccttgaaatggattgattatatgagtttcttgaaaacctatcattcggctttcggtcccggattcctgtttcgcgctgctgatattgaaattcagatcggttgtgatatggagctgaaggagaaagcttccaaactgttctccgacaaaaagaaacatgaggaagtagtggctaaattgattaatgaactggaaaagatgggattcatagaaaaggaaaatgaagtggacgggacatataaagtgttgactgctttccattatatggaagaattgattgattgtatcactatatcggaggaggtgcaagatgagatacctgaataagattgtttttctgaacagtgcccatattccttatgcagaggtgaaactggatggcaatgtacatttcattggtacgcagggagtggggaagagtacattgctccgtgctttgctgtttttctacaatgccgataaacttaagctcggcatccccaaggagaagaagagttttgacacgttctacttcccatattctaattcttacatcgtctatgaggtaatgcgtgagaatggagcctactgtgtagtggctgccaagtcgcaaggaagagtggctttccgttttgtagatgcttcgtttgagagggattggtttatcaatgaacataatgaggtgtatccggagtgggggcgtatccgtgaacgcatcggtggaaaacgccagattacctcgcaaatcaccgtttacgagatgtatcgtgatattatcttcggcaacaaccgtaagcaggacatgactccttaccggaaattcgccatcgtggaaagtgccaagtaccagaatattccgcgtaccatacagaatgtcttcctcaactctaagctggatgccgattttataaaagataccattatccgttccatgactgatgaagaggtttttgttgacttgagtttttatcgaagccagataaaagagtttgagcaggaatataatgacgtgatgctctggtttaccaaaaacaagaatggtgagattcccgtgcggaagatagcggataaagtgataaattcgtatcgtgacttgatttattcccacaaacagatagatgaggaacgtgctgagttgaactatgcagagaaacgggcgttgcaggaaatccctcatatcagagagaagataaacaaaacggagactgaacgtgaacgggctattcggctgattgatgaattgagagagaaatataataaggaaagagatactctcattagtggtatgggcggtattgaaacgcagttgaaacaggtgcgtgagaaacggctgtattatgaacaaatcaatatagaggaaatcataaagcgggtggcacaggaggaattgcaaaacggagaactggcacgcatttcgactatgaaggaagaactgacacgggcctatcaggatgtgttgtctaaatacggctcgttgtttaagaatttggatgctgatttgagtttgttcgaaaacagcagacaggctcagattcttgaaaaaagatcatctgttgccggacgtcaggagaaagctatggcgcagtctcgttccgaagaggataaagtgcgaacagcatctgaggaaaagctgcaaatggtggagcaacgattggcacaactgcgtggcgaggagatgcagatgaaattgaggcagcagaaagcgcttcatgaagaacactataagaaagaaatttcagattgtgaagctggcattgatgaattgcgcagaagggataaggaactggatttgcagatacgccggcagcaaatggatattggtcaacagaggaatgaatgtgagctaaaacgcaaagaactggagatggcggctcagaggagtatggatgtagtacgtagggaaaaggcggatgttgaagaacagttgcgggtactagatgcattgatagagaagcggaaaggttctttttgcgattggttggaacagcataatcccggctggcaagaaacgataggtaaagtggcggatgaggagtcagtgctatacaatcatgaattgaatccccgtttggcggatgatgctggaactctgttcggtgtttcattgaacttgtcggccattgaccggagcatacgtactcccgaagagatgaaacaggaacgggcagcgaagcaggtagtttatcaggattattgcaatcaactgacacggttggcggaggaattgagtgaaaatataagtcgcctggagaagaagtattccaaacaaattagggagatggtagagcaacagcatctgctggaagctgagcgagggcaaattccttataagctaaagaatctgcgagcggatcatgccacttggaaaacgaaggaagaagagtggaaaaaagtacggatggaagaatttcaggctggtctgaatgaaatagcccatcggttctatctggtggatgaagagaaaaagaaatatctgctggagcgtgagaaacagttgaaggcttgtcagaggagctataaagataccaaaatagagcttcagcttgaactggaccgttatgttgacgaggttcagcgggagattgatcgtcataagcaattgattgaagaacagaagagagaactccggcaggcacaggatgctgaactgaatggcaagggagctgatatggcaaccattcgtaaatatgatgagagattggcggagatcagggaagagctgaagtatatcagcgagcatcgcaatcaggtagcttattatgaaaaggataagcaagaactctttgataaagaatctgccatgcgtagtcggaagaaagaatatgaggccaaactttcggctttggatgagcggtttgcactgcgacgggagaaactgcaaaacggactgaaagaaataaatagtgctttggaaaagctaaggttggaattgcagatattagaaagcggattaacggaagcagatgcttttttgaatgatgaaactttttgtccggccggagcgatggaagtaggagagaaatctaccagaaaaaactgtgatactcttgtgaaggaacttaagtcgctcatagtctcttttatcagaaagacggaagatttcaagaaagccgtgatgcaattcaaaggttatttttctgcgaagaatacattccatttccgtacagaactgattggcgaacaggattactatgactttgcttcgaacttatgcgagtttgtagataatgataaaatttctgattatcagaagcatatcagtggacgatacactgatattatccggcgtatatcgaaggaggtgggagacttgacccgaaatgagagtgagattcgtaaaaccattggtgatatcaacgatgattttatagagcggaactttgccggggtgataaaggaaatatccctccgtcccttgccgagcagtgacaaactgatgcagctgctattggagataaagaaattcagcgatgagaaccagcataatatgggagaagcggatttattttcgcaggcttcccgtgaagatgttaatgcaacggcggtgcgttatttgttgtctttcatgaagcatttattggacgatccgggcagaaaacaattagttttggcggacacttttaaactggagtttcgggttaaggagaatgataatgatacgggatgggtggaaaagattgccaacgtaggttctgatgggacggatattctggtgaaggctatggtaaatattatgcttatcaatgtgttcaaagaaaaggcatcccgtaaattcggtgacttcaagatacactgcatgatggatgagataggcaaattgcatcccaacaatgtgaaaggaattctggactttgccaattgccgaaatatcctgttggtgaacagttcgcctactacatataatgtggaggattataaatatacttatttattgaataaagatgggcattctaatacgcaggtggtgcctttgctaaaatatagtaaggcatgagaaatggaaaaggatatattattactgtggctgcggcacgtaaagttgcacggatgttgaacggtgaatctgtgggttattcttcgtttcctgcatcattggcagaagaactattggcagaaggtgttttggtgcaaagttcttatggaaggcgtggcagttatcggatatgtgatgtggaaggatgtcgcacttttttagcccagcgttattccataagcgggagtttggaggagtggattgagatgatgtctcgtcaggaagcagtgtcgcgtgcggagcaggtggctatggcaggcaattctaaagttcggaaaactcgtgggtttaaggggtttcttgttaatagttatatcccgatagaagcaactttgcatgaagagccttttgtgatttatccggcggaaggtacttctgtatttatagaagattatgagcattttcgaattcccgatgatgtggttgtgataggaatggaaaatggagagaattttcaacggattcgtgggcaacaatacttatttgggggcttgaaagttctttttgtatcccgttaccctcaatcaacggatttgcgtacttggttgcagatgattcctaatcgttatatccattttggtgactttgacttggcggggattgagatctatcaaagagagttttacgcttttctgagagaacgctctgagttttttattccggcagatgtagaggaacggctgaagaatggtaaccgtaggctttatgacatgcagtatgcccgttataaatttatggatattatggatgaacgcttgttgcctcttgttgagatgatccatagatatgggaaggggtatgaacaagagggatatataatttagattataagaaacgggctgagttaaatacaatgaataacgaaaataaaaactgtattttatggtaacaatatctaactttgaacgctatgttcttcctaagattctggcgcgtggtgaagattattacgactctggtgctgtgctggaaattgaagaagagtctccgggggaatggtttgcaacagtttgtggaacggagcactatgaggtaatcgtatcgctggtaggggatgaaattgctgactgggaatgtgattgtccttacgatggaaatatttgtaagcatgtagtggctacgcttctggcaattcgtgacaatagaagcaaagccagctgttttttgtctgctaaagaagtggatgctcgaatgaatataccgggaaagagtgtgtcagaaattgtgaaggataaagaagtggagcaagtccttcggtttgcggaatcggataagttatccggttttgttttgcaatatgcttcttcacattctgattttaagtcagctttgatggaggcttttttgcctaagaaaccgacgaaaaaggtggactatcgaagtgagatagagagttgctttaattctttatatagaaaaaacttcaaaaagggaagatattatgaacctgagattgattgggatgagttatctgataaaatagagaaatatttgactaaagcaactttgttgtttcaacggcaggctttggaagaggcggcgacaattgctcttcagatacttcattctataggaggtcattatattgaggaggattttttgtataatgatggttatattgattttggaattagttgtgaagacgccggggatttattgcttaaggtagttcaacattcggatacggcacaggcattgaaggagaatatattgagcgaaattatccaaataggcaaaatggcaacatatcgtgagtatgatatttttgatatggatgatttgatacaacaaattatgctttcagtgcaatctaaagaggaggcgttggcaactgtaaaccagcttataatggagaagaaggaacattgggacctctataaactggtgattcggaaaatagaaatattaaaggaattgggtaagattgccgaagttgaaactacgatatctgaatttctttatttgcctgaaataaggcggcaggaaattgcaaagctattggaagggaaatgttatgagaaggctatcggtatgctgaatgaaggaatagtgatagctgaaagaggaggaaatcttggcacattaagagaatggcaggaacagttgctttccatttatgaagaagtgcataatgtcgccaaggtcattgaaatgtgccggttattgtttattcatacgaatggaagtttggattattaccataagcttaagtcgttgatatcttccacggattggaaggagtatttgagcacattgatgcaagaaacgactttctacgattactgggggagtggaaataataaagcagatatttatatagaagaaaaagagtatgataaattatttagctttttgtctgctgtgaaatacaggcgtttagacgctttagtgcagtatgcttcccatctgaatgccacccattcttttcaaatactttctttgtttacggatgatcttcgtgtttatgcggagaaaaatctgggacggaatcattatgagtatatagccagggtgttacggggtatgcggaaattgaatggcgggaaggaggctgtgaaacaattggtggaagaattcagggttttgtataaacgtcgtccagcgctgatgcaggaattgggggagttctagccatatcttatttacctgttatcttttattcgaacttgtcggaaatgaaagcagactatctaataagcgacagtctgctttatcttctttatgggggcgtaaagtaaactgtgtcatgcgctgtttttctttcaagctcatcggtcggggatcggccagcgccaagggggtgcaccagcactcccgacgagcgtaaaattacaacaacttaaatctatctccaaactttatcgccagttgttgggcaattgtgccccaattagccagtggcatagtccatttcttgcgtatgttgcgataagcgaggtagacaagcttctcaagggcggtgtcattagggaacacgcccttgttttttgtaactttccgtatttgccggtggtagccttcaacggtattcgtcgtataaatcatacgacgtatatcggatgtgaactggaagtattcagtgagcttttcccagttgtcctgccacgacttgatgacgataggatatttctctccccatttctgatctaaatcaagaagctccgtttcagcggcatccttgctgactgcaccgtaaacccgtttcagatctttaagaaactccttctggtgtttactgccgacatatttgatggagttacgtatctgatggacgatacaaagttgcactatggtatcagggaatacgctttggatggcatccgggaagcccttcagaccatcgacacaagctatgagaatgtcgtgtacaccacggttctgtaaatcggtcagcacattcaaccagaagtttgccccctcattcttagagatgtacatcccaagcaaatccttacgaccgtccttatctatagccaatacgttgtagattgcacgggtaatggcacagcctctctcatccatgactttataatgaatggcatccatccaaactatcggataaatatagtccaggctacgcgaacgccacgcttttatttccggaagtacccggtcagtgatggaactgattgtttcggcagacacacggttaccaagattctcttccatccagtcgcttatttcacgtgtactattaccaagggcataaaggccgattatgcggtcagcaacaccttccgcaagaatggtctcccgcttctttataaactgaggatcgaagctggaattacgatcacggggtgtagaaacggtcacctcacccatagaagtttgcacctgcttctgcatcttgccattacgacggttgccactcatgcgttcatcctcggaaagatgggcatccatctcaccttctaaggctgcatttaaaatgctctccaataacggggcaaaagctccgtccttacccaacaagggcttgccagccttgagctgctcgattgccttgttcttgatcctttcaaaatcaaattcttcactcataaaaaaactgtgttagcaaagttaatactttttttgtttgctttgctgacacagtttaaattacagcctccttctttatagagttttcatttggtatttgttcctgctctaaccgaaaatttttttcttgccgcaagaaacaatatagattatactcttccaaagtttattgaggtaatgtttgcaataaagccggtattccctcttttactaagtgtcgataagtatggaatcattgaagaagtccattctccatttacattcgatggcaaatttaacgtccaatttgtcaaggttgacttttacagtaatatcagggttgcaatttgcttcacagaaccttccatctataaatttgtctccagtccactcttgcaaagtataatattgaggattaagcatctttacaatacatttttcaaaatcaatgccattttttcgtttccaattaattacttctgtttcagattgtacacattctaattcggcttcaatagattgaaataaatcttctgcttctttgtctgtcaattgaaaataggaacggaacagttctttttcgttttccgttagaataccgtcagccattgccatttgcttcagtatttccagatcgtgattgtgctgtatcatatcctttactcgttataggtgtatttaggaatctacaatcaaaacttcatcgtaataatagtagaacttttctcttatgactctttacacagtttaatgagtttttctatccatgccctaaatcgggtacatttttccattattttagaaaaaccaatttctaatgcaatcaggttaccttccaatactttgtcataatcttctttgatagctaatatccgtttggaaggtgcaccttccggggttgtattaatatcttccggattatcataagaattgatgatttgttgggctttctctttttgtatttcatcaaagaatgaattaaatccttcatttgaagcaaagagtaaagcttcgaattcatgtaattgtatgtagggaatgaaacgtacatctttaatatcatcttttatgcatcgctccatttcttcaacctgtcctatatggctgctttttacactccatttttctttgtgtggaacttccggacaacggaagaaatcaacaaacatggatactatgaaatcttttttttctgatttcaataatcgttctgcatcttttttcagatgttgatagtttacaaagccaccccgtcctgttttgcttgtacgtatcaggatgggagttacctcgaaaatttcatgcttttgtaaatagggagcaatcagtgttttgacaaactcttgctcagtttgtccttcaacgatgatataaagtcttttcatggttgacctcctatcacatttttttcccatatatcaccgatgctgtactcgtcaatccatgctgctaagtcttctgcattaagtctgtggaatacagtttgtttattttccctatctactacaatgatgtcttgcggttcaaagcagttgacaaaattcactgactgagttgccaagatgatttgtttttttagagaagctttccgcactaaggctgctaatttgttgatggctgtggggtgcaatcctaattcaggttcatctatgatgaccgtttctggtaattccggttgtaaaagcaaggtcgctaaggctataaagcggagtgttccgtcggagaaactgttggcatctaaatacatgtcagattcaacttcttcccattccaaagttatagtgtccggagataaagggttgggtctcagcttaaaacttttgaagtagggggcgatggagcgtattactccctctatcagcctgaatgtccgtggttcgttctcttgtaatcggtataaataggctgctaaattggaagcatcgtgccttaatctttcgttgtctccaattttacatgcttgtctcattggagagtttatgctggtatcatggaagtgatagacagtgaaactttttaggaatgcacgtaaatatccaccatgccatttggggctatgaaggatttctgattcttccacagatttgtcccaccatgttttattccattgaccttcatagtctttggtcttttctccttttgtattgaagtagtcgcctgaatattcaataaaggctttttctccaacagtcggttttatttcaaaaaagaaagcattggtattcttgaaatcaatgagacttcggatgaaatctgattgttttcttccttggtatagcatacgctctattcctcctctactgagaatatagctacccaaacgttggtttaacatagcttgaaccagttcaaagaaagagatgaaattactttttcctacaccattggaacctatcaacacgttcaggctgttcagcctaatctttgcgttgcggatggatttatagttttctatgaagatttgttctatcatactcaatgtttttatttcacaaagttagaaaaagaaattgtataagtggtatgagtgatgatgttttctgctgtattaagaaaatacaattctattttctttccaccttctttacccacaaaaaataactcttcagcaacgtctcttccggtataagttccatcattccgtgctcttccagatacaactccgtagcccttgtaaacatcatcccgtttttgaacttgtttctgcgtaggaagcggtaataatccattctcatttcatagttgatttcctgttccaggattttcacggcttcttctcctaaataattgtaggttcgtggatctttccctacactggggcagggtagggaaaaggtgatatttccctgatcccgccatgacacacctttggggcggggagtggtgagctgtagtaagcaactgtaaagattctgattttttgtgaaacggatggaaccctctatggtacaatgcgcgtatgcgctttgcaggtaagccgcgagatagggctttacctgaatggtaactgtaatcattttgtatattgttttgaagtgaaaaatatttccatacgtttgtgtccctgtggcggggagcgttcctcggagcagtggaagaaggcagatgtgttactccggcaaacgatggaaaatcaaatgattacggtatgtcgatgttgctctacgaccaataggtcgtttctctacgaggaagggtgctttgtccgtagaggaacgcatggctcttctacgggactaaatcacccacctctgacctttggtgcaaatatctgtcaaattaacatctctggcaaaacttaaaggcggtggttaaagatagtattgtaatgaaacatttgtctttaatgtctgtttgtgacgtagtatatgcgcgtgcaataacgtgcgaaaaaatgaatgaatatgaagacagtctatttaaacaattttatgagttcggtggtcactgaacttgaaagaaacgggcagtacagtaccgcccatgtatgtggtagcgtgttacggtcagtgatggcctttgatggcgacgggttgctcctgtccggcattacgcccctgtggttgaaggcgtatgagtattacctcctccataagggcgaaaaaggcttggagtggaataccatctctacctatatgcgtatgcttcgggcagtttataaccgggcggtagtgcgtaaactggtgcctttcgttcctcatttgttcagggaagtgttcacagggcgcaaggcagaccatcggagggtactggaacgggatgatatgcggcaattactggcagaaaaggatttggatattatctctcccggtatggagtgggcacgtgcatgcttggagcttatgtttcgctttcatgggatgccttttgttgatcttgcccatcttcggaagtctgatttgaaggatggctatctgaccttgcgccgcagaaagacggggatgccgctttctgcgcgcgtggatagtcgagctatgcagttgttggagcgctaccggaaccgggacgacacttcgccttatctactttgttttttggatggaagtctggaaggaatggctgcttacagggattacttgcggatattacgcttgcttaacagtaaactgcgtgcgcttgctctgtggaggaaagtacagggtaaagtgacatcgtacacggccagacatacgtgggccactgtgggcaagtactgtcacattcccattgaaatcatttccgaagggctgggacacgcttccgtaactactaccgaggggtacatgaaggggtttggaaataatcggatggatcgggcgaataaggttataatgaattacatatttgagaggtagtctaatgtgctgtttgaaggttaaatgtttgatttatagctttatgtgaagaaattatcttgtaggtaacgtagatgttgttatggcgcaaaagtagataatatatttctaaatcccaagagaaagacattttatttgcttgtttacatgcatttatcaaccggtgatttatattagaaaacaaatactacagattttacaagtttctcttcctgtatacaggtctggcgaatgattattttctcctgcactgtgcaaatttgtatactatttcccttacccgtttccggaagctgaagacgggaaaaggattattgtacaccgtgaacagtatgtacatataaattcttgtatatattaggcttgtatgagtcttatgtcttgctgtatatgtgtgtatccgttacctacaaggtaatgccagtgcatataatggataaaacagaacaattatcatgataacatccaaaacacaagctgccatcgcagtacttaacgacatctatgcgggaggagacataatccgtgcggatgcttgccagcttacagagcaagatatggatatcctgctttcaaaacttttaagtgccggactcataaaactgtctgacaagggagattcccgtgatatacaggtgtacagccctgcacgtgactcttctgatgtttcccttctcgatatcctcgaagctactggtgagcatctggattgcaatcgccccactactgaagaatttcacatgcgatatgggaaagctgcgcagaaactcggtatagtgaactatatcacaagggaatatctgaaagagataaagctgtttgagttgtaaacgtaatccgcgaaaccttttgaaaagaaatactttcatattgtccctgattatgctgctgttctgtcttgcagacttgcattctcagattcttgcagtgaagagtgatctgctgacgggagcactttcttcgcccaatttcggggtggaagtgaagctttccaatcggctcacattagaagctggttttcattacaatccttttccggcaggcggagacaagcgttggaaacattggtttgtgcagcctgaactgcgctactggatgtgccagccctttggcgggcacttctacggtgtgcatttgttgtacggagtatataatgtgggaggtatgaaaatccctctggggctctttaggggagtacgttcttcaagatatgaaggggacttcatggggctgggagtatcatacggctaccactttattctcgccccccggtggaatatcgagacaagcgtcggcgtaggatttctgcataccggatacgaacgctaccgttgtttgcattgcggtgaacagaccggtggcgaacataaaaatttcattgcgccaacccgggttgcggtatcgctggtatatctgataaattgagagttgtttataatttagtaatttgtaattaaacatagagcatgaaaaacttaatccgtattcctttgacattgacactcctgttcgctacgtgctgtctctgtctcgggcaggagttttaccggggagaactatttgttaccggacaacatttttcgctgacgaatgggcacctgaatgtggaattgtccgttgacttcgaaggtttgaggatgccttcggatgagtcgctgaccgtaacccccgtacttaaaaacggtgaatacgagcaggagcttcctgctgtactcatcaacggggcggagaaacaaaaagtatatcagcggacacaggctttggcggctggtaaacgcaatagtgctaaggcacgcacttcgccaattccggcagtggtgatacgcaacgatcatgcggtttcccgcgcgtttacctataaagtgtcggtgccctacgagcagtggatggagcgggctatactcctgttacgttcacaggaatgtgcctgccatggtaagaaaggggatgtttatgaagataagatagcggatggaatccgtctgccgaagatgagggtatcccggttggatgcggatatcgatgccgagtttctttcattggtgaactttattcagcctgcaccggataaggacacgttgcattgcataacgggatctatcccatatttcaaacggaaggaaggacagaaagacgggaagcaacttggcgaactctccgaggaaaagcagaacttcgagatctactgccgtcttcgcgacgcactgcatgatgtacgtcaggagatgggtacagaattggcgaaaatcagtgtaaccggttacggcgtccctgtgggaaacctgaagaaaaacgagacaaatgccctgatacgtgctcttaagctaaaggagtatttacgtgaaaaccgcctggcgggaagaaccttactggatgtgagttggatttccgaagattgggactccatcaccagtctggtgaaaaaaagtgatatgcttctgaaagaggctaccctcgaccttattaataatatagagattgttaaaggtcgcgaacgtatgttgatgtcgtttgcagacggcaagccttacaagtatcttatggagaagatatttcctgaagtaatgcgtgtggactatcggatagaatacacccgcaagcctctgggcgctgctgaaagtcttcagttgctacgcagtggaaaacagcgcgctcttcatctgaatgaattctttgctgtggcaggtagctatccggtaggttctactgaatataatgatatactggaccttgctgcaaggcttttcccggagagtccggaagccaacatcaatgcggcggcagtggctttgagcaaaaaggaactgtctaaggcacgtgggtatctggaaccttttgccacccttccgatagcctataataacatggggattctttgtttgcttgaaggtaaccgggataaggcggaggtgtatcttacgatggcggccgccactggagtggaacaggcgattaaggcgttggaacaattgaaaattaaagattaagcaatgaataataaccataaacggtataatatatgaaaacgagtaattatttgtgggctgtgctggcaacagcaaccctttcgctgtctgcatgcggcagtgatgaaaacgagaatgtgatgcagccgaaagaaaagactgcaaagcttgaacttacattagtgggagcaccagcggacagtcgtgctacggggactctgcccaccaccgatgaatcccagatcaaccgcctgacagtagctgtattcaccggagcgacgggtaaccctgtcaatgccttgcgggaattcacaggcaaggatatcaaagacgcagagactggtagtggaaagatgatttcgatactttgtgaacccggcgacgagcaaacaatctatgtggtagccaatgcttctccggcgctttttgcgggagtaaccaaccttgccgggttcaaagccaagctgatgcttctttcggaaacaaccaaggctgcgggagcaggtgaggtaacggatgcacaaaaggccaataaccttccgatgttgggaatagtaaacaaacagaatctcacggcgggcgcagaagccacggctaccgcggagctaacccgtcttgttgcgagggtatccataagcagcattaagaccgctttcgacaaagcggggcaatttaaagatgccacattcaacgtgaccggtatctatctgaagaatgcgaatagttccgtcaatgttgaaaagactggcagtgttcctatcagtgggagtgacaaggccaataaatacctgtatgaagcggtgtcctcccatacagccaatacggaactcactactccgtactacttctatgcatttccgaatgcttcggctacaccgaccaaacttataattaaaggaacatttgatgcagatggaaccggttcaaccagtgctcccgtgacccggtattatcccatcactattaataagaaacaggcgaacaccactattacaggaggagagggcacagacaaaggcagcatagcagttaatacccgatacgtgcttaccgccgttatcaagggagagggggtggatgatgatagtaaggaaatagaccctgctactttgaaactgacagttactgttgctgattgggcgcttaccatcaatcagaatgtgacttttgagtgatattttctatgagacagatatgacattataaaccaatccgtaccagcctatgcgagttttcggaacattccctatctttttgctaattctttttcttctctgtttcgtttcgtgcgtgcgtgaggatatggaaggttgtgcccggtatgaactgcatgttcgtgcggtggatgcggacgggaacgaccttaccggaaatggagttttgcagaaatcggatatctatctttttaatgaacaaggtttcgtcagaatgattccctctgagggcttctcggacttttcatttggagaggacaaggacgaacggctcacgctcgtagcttggggtaatctgaaagaagatactctgattactacggagatagcaccgggaacatccctgaaagatgcgaaactccagcttcggcaatatacccacggtacgcacattccgctaacagacctgttctattgtcgcagagaaataggggagataagcacgcggggtgtggaaggaacggatattacactcgtaatggaacgtatggtggcgggcctcagtatacgcacgcgttatcttgccgaacgttatccttataacggtgaagcataccgtttcatcgtacactgcatcggtacggaaatggattttatgggtgaggcttcgggggacggggccggatacgaaccggcttccgttaccgatgccaagggggatgtctatgcaccgctttttcatatattccctaccggggagggaaagccgttggaaatagacgtctaccggaaagatgagaaattatttactatcactaaagataatgaacttcgtcctttgtatgcccctgtggggcaacagaccaacattgatatagactttcgttatgcggaggttaaggtttttgtgagtgtggttccctggggaacggtcggtcaggatgtagaaatgtaagtaagaaatgtatgaataggttatttgaatacagggtatacccgaaaacggaaggacccataccgttttgttggaaggtacttttcgtgctgttcatgctgggcacactgttagcaatggcggctgtatgcagttcttgccaaccggaagaagagggtatggaggctgtgggcatggaggaaggtctgcccgctaccattcgggtggaagtacagggtgaagaacaggtgaatttcgttacccggacagtcaatgagagtgtgatcagtgacctgcacattttggtctacaacagtgcgggtgagctgatcggacagaaataccagacgggtagttctacgattaccattaatacgcgcagtgctaccggatgtaccatatatgccgttgccaatacgggtaaagctgacttgttcaagggatatgtcatacataaagaatcttatctgaaaagtatggtatatagcctgaccaattgggatgacttgaataaaggtatcaacctgccaatgacgggaagtatgaaaagtgtgaatatcaaggtgggggcaaacacattgtcgggaacactggtgttaactcgtatggtcgcaaaagttgagttaaagattaaagtgaaagaaaatagtgggattaacattactaatttgaaaatttataatcttcctaaaagctcctactatgtatccggtacagcagatgcgacaaataccacttggttgaactgtggcggtataagtccaagtagtacaaccactgccggtacaatattctatatgtttgaaaaccgtagaggaaccaaaacgattcctgcccaaaaggataaaacgactgcaaatgcgcctgcacatgctacatatgtagaaattaacggcacaataggcactgttactgcaaagtggacagtgtatcttggagaaaataatacgagtgatttcaatatcaagcggaatggcaattatacgtataacattactctgaatgacgttgcggtaacagatacgagggttgttgtagattttacaggaacagaagatttgagtagtgcaggtacggcaaattgttatcttgccaagaaggtaaatacatggtataagtttaaagctacagtgagaggaaatggggcttccactgctgcattgatttctccgaccggaagtgctttggctgctaacgctactatcagtcctgcaagtgcagaactcgtttgggaaaccaatggtcatgggcaaataatacaaggtatgattctgaaagatggatatgtttatttcaaaactggcccggcagctgaagggaatgcagtggttgcggtaaaagacggaagtggtaatatactgtggagttggcatatttggaaaacccattttaatttggcagagatacctacgcaaacatatcaaacgaatccaagaggtggaatgaatggcaccatttatgcagatgttttgccggcaaaacgtacactggttatgatgaattgtaatttaggtgcagctagtaatattgctaccaataatgctgaggttgtgaagacgtttggattgtattatcaatttgggcgtaaagaccctttcccagcagcaaagaacagagaaagaagaattgataataattctgaaatagtagatgtttttgatcgaaatggaaacaaacttaatgcagctacattgagaggggagaactatcaaatcataaatagtctgatttcatcatctgtacagtcaattattagctattcaataaagcgaccgttggtttttattgtatgtggtgaggataattcttacaattggatttatagagccacaagtcagtcagaagcatggaaagcttccaaccggttgtggggtggagaacttaataatgaagcaaccagtaaacgtcttgatacaaagtttacaggtaaaacaatctatgatccttgtcctttggggtggtgtatgcctcctcaagatacatggattaattttaccaccagtcttttgaatggagataaaaatagtaactacaatataaatattgcaagtttatataatactccaattgaagataagaaaaattatgtagatggtaataattctggatttgtaagttccaccggagtttttggccgtcgttattatattaatggcaatacaggtgatcaagctttttatcctgcgtctggttatagaaacggtattaatggacagatctgtgatgttggtgccagttcatgtgcatggtcatcatcccccgtcagtgctgatttgccacaaggggcttgcttgaatacaaatattgcatgggtgtatcctgttagtagccatagtcgggcaaatggatttcctgtgcgctgtgttaaagaaacatctttatagatggaagataatcctgtggttgctttaactgacattacaacataataggcgggggcatgtcaaatctactgcctgctattgtatgttggtaatggctggcagtagaacaaactttcgttaaaccaatacgttcattctttattaccaagaatttaggctacctttgtattttattaacttatttaccaagcattatgggactactcaaaccgaatcaagttctgaacaaagcatataggcaggttgcgattgaaacagcagattttgacctgttcaaaaatgcccttcgtacattgagggacaatgtagtggatgggcaaagagaagaaacgcagaaagaacatttacgtaatttcctcagtgaaacgttctacaagacgtattacatggctcccgaagaggatattgatttggctatccgattggataaaactaccaagtccaatataggattattggttgaggtaaagagcaccactaacaaaggtgagatgatttctaatgacaatctcaatcgtaaggctttgcaggaattattgctatactatctcaaagaacgtgttagtaagaagaacaatgatattaaatatctaatcgctaccaatattcatgaattctttatttttgatgcccatgagtttgaacgtaaattctatcagaacaaacaactacgtcgtgagtttcaagattttgtggatggacgcaagaccagtagcaaaaccgacttcttctatactgaaattgcaacgacctatattgaggaagtgaaagacagccttgaatacacttacttcaacttacaggactatcaacatctgcttgataaaacagatggcagcacttcacgtaagcttatcgaactttataagatattcagcgacacacacctcttgaagctatcgttccaaaacgacagcaactcactcaaccgtggattctacactgagctgctacacattattggcattgaggagcgcaaagagaacaacaaaaccgtgattgtacgcaaagttgtggaacggcgtgacgaggcttcattgttggagaataccattaaccaactggatgcagaggactgtttgcgccacgtaaatggtagtctatatgggaacgattatgaggaacggttattcaatgttgcaatggaactgtgtatcacttggatgaatcgcatccttttcctgaaattgttggaggctcagatgttgaaatatcacaatggagatgttgcctataaatttctttcaacagccaagattcatgactatgatgacctcaacacactctttttccaagtgcttgcacgtgacatgagtcgccgcacacagtctgttatgcatgattttgcttacgttccctatctcaacagctctcttttcgaggtgacagatttggaaagtaaaactattaagataaacagcctttcacaacgtacggaacttcctgtcttaacgagtagcgtattgcggagtaaaaaacgcaatctacaagtcaacgtattgcctaccctccaatacttgttcgcttttctcgatgcttataactttgcgagcgaaggtagtgaagaagtgcaagaagaggctaaaacactcatcaatgcctctgttttaggccttatattcgagaaaataaacggtcacaaagacggttcggtatttacaccgggctttatcactatgtttatgtgccgcgaagcaatcaccaagaccgtactgcaaaagtttaacgattactatggctggaattgtgccacccgaacagacctatacaaccgtatcgacaatatagccgaagccaatgaactgattaacaatttacacatatgtgaccccgctgttggttcgggacacttccttgtttctgctctcaatgaactgatactcttgaaatacgaattgggtattttggtggatgctactggtaaacgtattcgcaaagctgactatcagtttgccattgaaaatgatgaactgattgtgaccgatgccgaaggcaacttatttgcttacaacacactcagtgcggaaagtcgccgtatgcaggaaactcttttcaaggagaagcgtcgaatcattgagaattgtttgtttggcgttgatattaatcccaactctgtgaaaatttgccgtctacgactgtggattgaactgttgaaaaatgcttactatacggttgaaagtaactatacttatttggaaaccctaccaaatatcgatattaatattaagtgtggtaactccttgcttcaccgtttcgctttgactgacagtattcaaactgtactgcgagaatcaggtatcagcatcaaccaatacaaggaggctgtagccaaatacaaaaatgcccaaggaaaaggggaaaagcaggatttggaaacgcttatcactgaaatcaagtcgaaactgagaacagagattagccgcagggatgtacgattggttaggttgaacaaacgtcgttctgagttggcaaacctacaagcacctcaactgtttgaaccgacaaaaaaggaaaagaaagcgtcggacaagcgcattgctgacttaaaaaaagaaattgcggctttagaaaatatatttgaggagatacgttccaacaaaatttaccttggcgcattcgaatggcgcatagagtttccagaagtactcgatgccgaaggtaacttcttgggatttgactgtattattggcaatccaccttacattcagttacaatctatgggtaagagtgccgatgtattggaacgtatgggttacgtaacttatgcacgtactggtgatatttactgtctcttctatgaattgggtatgaatctacttagtcctaatggttatctttgctatatcacgtctaataaatggatgcgtgcaggatatggtgaatccttacgaggttactttgcaagccaaacgaatcctattatgttggtagattttgcaggtgtcaagatattcgatgcaataacggtggaagcaaatattcttttatctcaaaaagcagtaaatatttctaatacacaagcttgtttggtacaagatgcgaatggcttgaataatttgagcgattttgtgcagcaacagagtgtggagtgcaattttgtttcctctgattcatgggtgatactttcgcctattgaacaaagtattaaacgaaaaattgaagctgttggaactccgttaaaagattgggatattcaaatcaactacggcattaagactggattcaatgatgcatttatcatcaacacagaaaagcgtgatgagatattagcgaactgccaaacagaggaagaacgtatcagaacggctgaacttatacgaccgattttgagaggacgcgatgtgaaacgttacggatatgattgggctggtctttggcttatcaatacacataatggattgaaaaataagggaataaagcctgtagatataaatgattatcctgcaattaaagaatggttggataatggaggatttttctaagccaaaaattgtgtggaaaataatcggaaaccaaatggcttttgcatatgataccaacaattatgtaatgaacaatgcgtgttatattatgacaggcaatcatttggattatctgttggctgtattgaattcacaagctataacatggtatagctatgtgactaatatgaataaaactggcgttggagatgttcaagttggaggtcaaaatatagcgactttccctatgcctccttatgatgcaaacaaaatagaacttgttgaattagctgaacttgcaaacagtataacaaataaaaatatcaatctaccattcattgactctaaaatagagagtttggtttcaatggtatatgggtttacgagtgaagaaactaattttctacattcatttgtttcttcactccgaaagtctatttagactgtttgctggttttcaatatattggatttcatctgaggtaagcttataaatatcatacatcaacttattgctaaaacattcaaaatccgtaatactcatcttgcctactttcaaatcattgaaagcagcaagatgagtatttagttgttcagtagatagcttggcaacaataagctgttctatggtatactttttccatctaattgtccccactcctgtagttgtccctactttagaaaacaaccattcagatacagacgaatttaaagcagacaaaaggtattcaatgtattcgcctttcatataaaaagaagttgcttctggtatatattcccctaaaaagtcgaaagcaaattttgatttatcagatatttctccccacacaatttttggcttagaaaaatcctccatatatgcgcagtttcgtaggttatatggcgtatcacctcggtcagaccgtttctctatttgtgagaatcccttatacattttaccgctataggctatacctcccaataactgatgctatcttgtgtttcaaaccattcgttacaggttttctttcgggcttttatttttttgccattaacaatatgagtttctcctgtttgttccaaacgctctatgccaattgaaagaagataatttttcaccgcaggataactttctatatcataatgtcgcgaaggaaatgtggcaataatccacaagtccgcccactcatattcatatctcttgatatccctgccacgaagaatcggtcgtataagttcagccgttctgatacgttcttcctctgtttggcagttcgctaatatctcatcacgcttttctgtgttgatgataaatgcatcattgaatccagtcttaatgccgtagttgatttgaatatcccaatcttttaacggagttccaacagcttcaatttttcgtttaatactttgttcaataggcgaaagtatcacccatgaatcagaggaaacaaaattgcactccacactctgttgctgcacaaaatcgctccttatgtttctaccataaaagtcttgataaatcgagcgagcgtatttctatccactttacaaattttagagattttgcgctgtgatacttcagcttttaatagttcttgtatgagaattttcttaccatgaagtttgtacttctctggagcactctttttccctttaggacgtcccaataccaccccctctgttttttttcgtgccaaggcttctttggttcgttggctaataaggttgcgctcaatctcagctgacagtccaaaagcaaaagccaatactttactttgaatgtcctcccccaaccgatagttgtccttgatagtccaaaccctacattctttgcccatgcaaatattcagaatctccattatcataaagagattacgacccaatcttgacaattcagcgcagataatcaaatcatctttctgtaccttattgagcaattttccaagctcacgtttactgtaggcttttgttccgctaatagtttcttcaatccaaccatcaattttcattttctggtcgttacagaagttattgatttcaaaacgttgattttccacagtctgcttatcactgcttactctaatatatccgtatatcatatccctaaatttaaatgtttatatatatatatataatggatagttttaacagataaacctaaaaagagcgttgatattatttctaatccttattatttcatctttggttaatcttcaatttccatttttgtatagagtaatttgattttttcttcttctatttatgcatagaacgaattacttgaaagcattgcacagcagagcgcagcaataggcacggttgccaactcgttacctcaaaatcgggcacttcttccaaagcctttataataaggcgataagaaatttattccagacttacagaaaaatattgtaactataaaaatatttaaatcttaagtataaattgcttgaacttcagattggtgataatatttgagtttgaataaaagtattttcttaattttatgatagttgtctccccccagaagcttcgtagtctccattaccgtaaatatagcaaaaagccgcttttcaggaaaagacaaaggtgcggtgaacacacggataaattcgactttgcacatcgtgcctttatctgtaaaaagaactgttttcaatcttaactatctttctcataatgtctatttttttataatactctaagagggacatcccaacggtaataatagattttcactttgtttctgtaacaaggaagtgttcccgagtatatgccccggggctgagtatgaaacttttataaaacaatttatcagttcttgacgtagataaaagaagatttataaaggcggtcattgaattctccggatatactaccgtgttttcttcctgttttttgagtaggtatgtgatatgtacatacgagtaaatgatgattcgctcttacaaggcgtataggtcttatattgtataggtgtatagctttgaaataccatagtaagtgttcatttgagttttgttgaagttgccgcatctttacaacgttaacgttagcgaagagattttgaacatgatttatttaatttaaaaagaaagaactatgagtattttgtataagaaggtttggagattactaaatccccttgataagaaatcgacaaagaaggtatatccggttatcacctataagtatggtgtggcgatagatctgaaacagattgcgaaaaagatcagccgactttccggtgtgagtgaaggtgtggtgaactctgtgctgaaggatttccgtacggagttgaaagaagagttgcttttggggcggtcggtgaacattgacggactgggatttttttatcttgccgcccgtagcaagggggcggatacggcagaggcgtttacggcgaatgacatcactggcttgcgcgtttgtttccgtgccaacaaggaaattcgtattacggctaacggaagcacccgctccgaaggacttagccttaaagatgtggatcgcatcaatgacgaacttcctacagaaggtggtggcccgtcgtcacctgatggaggaatagtggaaaacccgcttgggtaaagtttaaagctgaggaacttggaaattaaaaaaatgaagaattaaaaattaaacgattgtatttatgaagaagtctgttttgaaaaaaatactgaaagtagtgatggctattgtttcggctgcgctgggagcactggggaacaatgcaatgaagtgatgacgaggagatataagatctgagttaaataatagataggggagtgtcggaattcaggcacttccctatatttttaatgaaccattccgtaaagtaaagatcgtaaaggaagctatcctgcggagtcggtaccgtacttgttgcactggtgagcaaaagaactatgtgtaaataacgaatgaaaatgcgtaagaaaaaacttgttacttaattgtgttttcgcctgaataactttacctttgtttcataaacctaaaaaaccggtaagtcatgaaatacaaactattagttcttgatgtagacggaactctgctcgatagtgagaagaaaatcagcaagcgcacactggccgccttgttgaaagtgcaacagatgggtgtacgcatcgtattagcttccggcaggcccacctatggccttatgcccattgccaaggctctggaactgggcaattacggaggcttcattctctcctacaatggcgggcaaattatcaatgcgcaaagtggcgaactactctttgagcgtaggataaaccccgaaatgctgccctatcttgaaaagaaatcccgtaagaacgggttcgccatttttacgtatcacgaagataccatcatcaccgactcgcccgaaaacgagcacatacgtcgcgaagccgagctgaatggcctgaagataattgccgaaaccgaattttcgatagcggtggactttgccccttgcaagtgcatgctggtaagcgatgacgaagaagccctcgtgggactggaagaccactggcgccggaggttgaacggagcgctggatgtatttcgttcggaaccctattttctggaagtggtgccctgctccattgataaatccaatacgctgggcgccttgcttgagaagttgggcatcaactccgaagaagtcatcgccattggcgacggagtttgcgatgtctccatgatacaatccgccggactgggcatcgccatgggaaacgcccaagactcggtgaaggtctgtgccgaccgcatcaccgcctccaacgatgaagacggcgtggccgaagccgtggagaaggcgatacttgccgaaatccgccccaccgacgtgcccctggatcaactcaaccagcgtgcccgccatgcattgatgggaaatctgggtatacaatacacttacgcctccgaagacagggtagaggccaccatgcccgtggacgaacgtacccgccaacctttcggcatcctgcacggaggtgccagcctggcattggccgaaaccgtggccggactgggttccatgatactttgcaagccggacgaaatagtggtcggtatgcaagtcagcggaaaccatatctcctccgcccatgagggggatacggtaagggcggtggcgaccatcgtgcataaaggccgctcctcgcatgtgtggaatgtggatgtgtttacttccacggccaagctggtgtcttcggtgcgtgtagtcaatagcatactgaaaaagggatgatcgaaaatgaattggacaacgggccacaagaaccacccgttgaatccgctaagaagaacaatacccggaccctcgtaaaaagaacacttgcgattgccggtttagccttggttgtatattttttgtactccatcgttcacctgtttgtttcgcccgaccgcaacattcagcaaatctacctggtgcccgaagacgcggcatttatcatccagtcctcggcgcccatcgacgattgggcaaagttcagcggaagcgcaacctggcaatgcctgaagcgtgcgaaagccttcgaggacgtcacccggaatgtggagacgctcgacaccgtggtccgaagcaataaaatgttgttatcgcttgtgggcaaacgggatatgctcatctcgatccataaagtccgtgcccgcgattgggatttcctgattgtgctggacatgcaaaaggcctccaagatggacttgttgaaggatcagcttgaaacggtgctcaccatggcgggcagttccgtaaccaaccggatgcacaacgggattaacatcctcgaaatgcgcgatccggatacacgcgatattttttattgcgccttcgtggacaaccattttgtaggttcctatacctccaaacttgtagaatcggccattgattcacgcaacaagcccaaaatcggtctcgatcattcttttatcgaagccgaaaaactggtgtccggcaaaggacttgtccgtgtttttatcaattatgcacgcctgccccaattcctgaatatttatctgggaaccgggaacgagtacatcgatatgttcagcaattccatggattttgccggactctatttcaataccgaccacaaacggatggaggtgaaaggatataccttgcggaaagacaccgccgatccgtacatcatggccttgctgaactcgggtaagcaccggatgaaagcccacgaaatcctgtccggccggacggcactctataccaacatcggtttcagcaatccggtgacgtttgtaaaggaactggagaatgcactcgcggtccacgatccgcaatggtgcgaatcttataggagttcccggcagaagattgaaagcctgttcgacatctctctggaagaaaacttcctgagctggatgtcgggagaatttgccatcacccaatccgagccggggttgttggggcacgatccggaactgattctggccatcggcgccaaaagcatcaaagacgcccgtaagaatatggagtttatagaaaagaagatcaggcggcgcaccccgctccggataaagacggttaattataagggatttgaaatcaactatgtggaaatgaaaggcttcttccgtctgttcttcggagggctgttcgacaagttcgaaaaaccctattacacgtacgtggacgattatgtggtgtttagcaacaaagcctcgtccctgctttcatttgtagaagattacgatcagaagaacctgttgaaggataatccgggctttaaaaatgctttctcgtacctgaattcgagctctaccgttttcttatatacggatgtacataagttttattaccagttgaagcctatgatgaatgccgttacgtggggagagatacaatcggacaaggacattgtctactcatttccctattggaccatgcagattacgggagacggccagtccgcctcgttgcaatgcgtgatggactataaaccttatcaaccggaagaaacggccgtagcggtggtggtggacgatgaagctgacgaagtaatgaacgaagatgccgaaacggagaaggagcaaatgagtgaattgcaacgcttctatgttgagaaatttgagggcaacgtcttgcgggagttttatcccgaaggagcgctgaagagtgaagcggaagtgaaagagggaaagcgccacggacgctatcgcgaatattatgagaacggcaaactgaaactccgcggaaaatacggaaataacatacccaaaggcacatggaagtactatacggaggagggagagtttgaacggaaagagaagtattaaaaaagagaaaaacaatgcttgcatatacctatattgaacacggaaaatttgaacttatagaaaaaccgaaacccgggttgaaagacccccgcgacgccattgtccgcgtgacgctcggtagcatctgcaccagcgatttgcacatcaagcacggtagcgtgccgcgtgccttgcccggaaccacggtggggcacgaaatggtaggcatcgtggagcaagtgggcgcggacgtcacttccatcaggcccggcgacagggttacggtgaacgtagaaaccttttgtggcgaatgcttcttttgccgacacggatatgtgaacaattgtaccgatgccaatggcggttgggcactgggttgtcgcatcgacggaggtcaggccgagtacgtccgcgtgccttatgccgaccagggactgaactgcattccggatgcggtgagcgacgaacaagcgctctttgtgggcgacgtgcttgccacgggcttttgggcggcccgcatatcggagattaccgaaaaggatacggtgctcatcatcggcgccggccctaccggaatctgcaccctgctttgcgtgatgctcaagcacccccgtcgcatcattgtttgcgagaaatctcctgaaagaatacgccttgtgcgtgaacattatccggacgtacaggtggtggaaccggaggattgccgggagattgtgttgcggagtagcgatcatggcggagccgacgtcgtgctcgaggtggcaggaaccgatgacaccttccgtctggcgtgggagtgtgcacgccccaatgccatcgtcaccgtggtggccctctacgaccgcccccaggtgcttcccttgcccgatatgtacggaaaaaacctgaccttcaagaccggtggcgtggacgggtgcgattgcgccgagatacttcgcctgattgaagaaggcaagatagacaccacgccgcttatcacacaccgcttcccgttgaatgagattgaggaggcttaccggatttttgaaaataaactggacggggtgatgaaagttgcggtgtccgaaagagaaaagaaagaattcggaacgataaagtaatgagccaaatgattaagtaatactatcttaattctcctcctcctgggaggaggagtacccgtagggggaggtggtaggtgagaaaataattccttatttatatgattcataggtatttcttgctttacctaccaccccgccctctgggcacccctcctccgttggaggaggggaattgagatactctatttactcaatattgaaatactcatttacttcataaccttattaaaaagaatacagccttatgcccattattgaaatatcctccttgtcgcaccccggaatcgaggtgttctccaccctcaccgaggcccagttgcgcaaccgcattgagcccgataaaggcctgttcatagccgaaagcccgaaggtgatccgtgtagcattggatgccggatatgaacctctggccctcttgtgcgagcaaaaacacatcaccggtgatgccgccgacatcatcagtcgttgcggcgatgtgcccgtctatacgggcgggcgggagttgctcgctacgctgacgggctatgtcctgacgcgcggagtgttgtgcgccatgcgtcgccccgcgccccgcacggtggaagacacatgtcgggatgcccggcgcatcgtcgtcatcgacggtgtggtggacactacgaatattggtgccatttttcgttcggcggccgccctcgggatggatgccgtgttgctgacgcgtaactcttgcgatccgttgaaccgtcgtgcggtcagggtgtccatgggttcggtctttttggttccctggacgtggctggacggcactctcggtgatctggcccgccacggcttccgcaccgccgccatggcacttacggacgattctatctccattgccgatcctgtcttgacgtccgaacctcggctggccattgtgatgggaacggagggagaggggcttccacccgatacgattgcggtggcggactatgtagttcgtatcccgatggcgcatggggtcgattcgctcaatgtggcggcggccgccgccgtggcgttttggcaacttcgtattacggattgaaactactattgttttaatttcgatgagtatcattaggtagctaataattagcaatctgaagatttttcgcatgacactttcttttttgctattttcggtagcttaagagtgaatcaaagaacgggtagtctgtcacggaagtgcgagaaaggaatgagtgtgaggtgataaagtgataaaacttctttcaacccattatataataaacaaaaatatattcttttgtatattatatgatgggttgctacactacaattaatattttttcttttcgtctttatttagctcttcgtgtatattcatccttgatggcggtgaaattttcttttacctgattgtactcggattcttgcttctcttccaattcaagatctaatgcatatatttcgctcgttattttattgtctaattttgtcttttcagcttgggtcaatatattgttgaatcgagaaaataatttcactttcagatccaatagtcttttttcgaaccgttcaaggtcatatttcaggttgtagtcaagataggtattggaaatatgtttcttttcaccttcttcattatactcaattactttctcctttttcttcaccgcattgaaaagggatgaaacggactcatcaaaatcctgaaggataaaatctatccatttattatatatattaattttgaagcgcgaaacgttgacattctcgggcaaaggatagaataataatatgaaattcatctgcgtttgagataaaagttgctgtccctcacctgtgtagtttacgggtagattttcatagcacataaactcgccctcatggataaaaccctctccatccaccaataaaacttcattagaggcgaatgtccaattctcatgccctccgatgttttttatgtttaggatcaatttatcagcagtaaatttggatttagttttgccatttcccatcattaactgggctggacaatcttgatagtattttttatctttaatataacgacagttcttgttacattttatctcgacgtttctctcgaatgagaggatggtatagataaagccttcattttcttttggaatattaatctcgctcataaataatgtattttagtgttttaatttgtagattattggtgattagctgacatgtctattttccgatgcagcatatttacatcactgattatcagtgaccattcattttaatcggtacaaccacagttttgacaaatgcacagaatgtagggacaaatgcaaaccgctgtatttcatagctttgcatatacgtgttgtaccgcctcttttcagcctttttgtggaatgtccgctatcagatacaaggtgttgagtgatagggcatttccgtaggtgtgttacagaacgcttgttgaatacaaaggtagtggttttcttgggatttctgtggtttgcgtggactttttcttccaaagaggttgatttacagtagaaaaacggttatagagccagaaaacttttgtagatatacactcgattcgcttgaaaaagtgtagagaaatgggttatattcgtttgaaaaagtgtaatgaagttgaattattcgcttgaaaaaatgtaattgcttccgtttgcccacaatggaaaatgtttgtatgtcccaacagaaacacttatatgcttgtaacaactattatatcctatcgggtataattctgcttattgtatcaatattatacccgaaatggtataattaatatatttgacagaactccataatgtcgagcatctaatattggatacatagtttgaacaccaacagattaaagtctcatgaatatcaccggaaacaattattgtcttagtttcgggaaaagatagtgaaaatatgccgttatggttcatcttatgttcctgttaatagtgtttatagatagaattaatccttaccatacccctccttctctttccatatcttgatttctttatcaaaatccgaaagaaactccttgtcttgtataaagcgaaatttatcatattcagcgtatgccttttctttcgcttgttcggcagaaatggtgccagcctcattgtatttgtcatactcatatagagtcaggaaatcatccaattgctttttccaatctgccattgtggagatgatttgccgttcggcacgaagttcggccaaatcaaggaatgcggttgatagacgattgaaagctgagacttctttgtcggacaagtaattctgggcgataattgtatccgacttttggactctgccgtcaggagcgtttttccacgtggtaagtcccatgtggggcttttgggcatctgctcttgaatagatgatttcggttgccgtttgatgggaagtagcccaatacatcatatcttgcaccctcttgaagaattgtagggtggtctcagccttaggatcataatcggcactacattcggcatagacatcggtgattttctgataataccgacgttctgaaactcgtatttctcggatacgttctaataggtcgtcaaaataatctttgccaaaatgtttgccctgtttcaagcgttcatcatccaatacaaatccttttatgatcatttcttttagaaccgatgtagcccacatccggaattggcccgcttgataactgcccacacgaaacccaacagcaataaccgcatccaaattgtagaacaatgtatcatcgttcttgccatcaagttcagttgttcgaatttttcgaataactgaactctcctccaattctccgcttttgaatatctctttcagatggttattgatcgtattcgtttcaacaccaaacaaatcggccattcgcttttgcgacatccaaaatgtttcattattgaagatgacctctatacggctttctccttgtttcgtcttgtatagcaatatgttggaagatagactgttgtctattaattcaggagttgatatttcttgtttgaaatattcttttgctatctgtacttgtggcttcttactatcggcattttcagcaatcatcaaacaagcgattcgtgatagatgtatattctccaccttacgaaaggagccggaatttagtttgaccatctcaaacgtagcattaaaatgctcggtagtgttacaacctttcttattggctatggcgatagctttgtttagagtacgattgaatttttggtatgtgccatagcctaatgcggtgcacaactcacgagaagtccaatactctaaacctttattatcttgctttttaatccgttcaaagtcgggttgaatagagggtatattgttctcgtctatcattatttcatgttattggagttatacaccgccaatcctttaatcgtcaacatgtatttctgacgaggatgacggggcttgtctgggtagagcatagaaacaaatccctcttttatggctggattgagagagtattccatgaaattttcacggttctttaaacctacggctgccatcatctctttgactgataatctattgtttgcaagtacctctattaaacggttgatattttcattatctatctgtaatggattatctaagcttgtcggggtacttgtcggggtacttgtcggggtggagatacccatgtcttcgggggcattaaccaccatgaaacgattcctcaattcattgttttctcctatcaatagatttcggaagaatcgttctaaatacacaggctctcttttgatgcctttttgtatgttttgataattggctctaaccaaagcattacggaaataccaagaatgattggcaaaaaggtcgttctcgacattgaatcccatcgagcgtaaatactggatggtgaacactgctgttgttcgggtattgccttctccaaacggatgaatctgccacaacccggatacgaattgggtaatatgagtgacaatttggtctatatataatcctgtataatcaaacgccttttcttgttcaagatcatactctatggctctgcgaatgtcgggagcagatacataaaataccgtatcgccacgaagcacccattcttttttggtgatattgtaatctctgatttgtccggcaaacttgaatactccatcaaatatacgccgatgaatggcggtcaatccggctacggtaaaagcaaatgaacgctcattcaatagtttggttatattggcagaaactttatccgcttcttctgtttcgttatccttttcagtacgaatgtcttttgaatcgtagtaactcttgataagttgttgtacttcatcaatggttatgtctccctcaatatgcttgcgagcagtttcaataagataatccgagggcttcaagccatctaccgcttgaagtcctattgccgtttgccaagcatagcctctttcacgcttttgcggttcgccttgctggatgtattcatcgaaattgaccatcgtaatatcatttcgcatgttttcgtatagcagatactatgctttctgtattccaatgaacaatttcgtcggctctatcatttacaatagcagaaattcgctcttgtcctcttgggattaccccaataattggaactcctttttctatagctttgtcaagctcccatttcatccaatcactatatgaagcatagattccagcgatacctaaaacaatatccgaagccgctattctttctgagattcgctgtcttatgtaatatgtattcattgaatttatagaatctgttggtggaaattctgtaaattcaacattaaagtaccctcttgattcgagaaggtttcttaacgattttaagtcatttacatgtgaccaagaatgactaatgaaaattttatatgttttagccatgtttttatttctttaaaattgattttgttttctcgaaactatctatttgccattgtaagggttgctggtcgtgaaatagtctctcatacttttcagcttcagcatggttgcctaatgcaagataggcattagataaagaagcatatttccaaagcaactcttcggcttctgggtcttcaagagatttcagaattatatcaataatctcagcatatgtgagtttggcttcaactatagaatgtgtctttagttcttctgatatctcatgcaatgattttatatacatacaagttgcatagttttcacctgtataataatctttatattgattccatccttttttatatgaatctatggctgagttaagataacttttatcggatgttatttcccataatcttttatttattgctcctaaaattccaagagtttctgtatctgtttggtttcctattttcgccattattagcatagcatcggtcaacgctctttgtgtagatggtacttcacttttgtaacggcacaacgctcgttgttgaatatagtatttttcattttctgttttagaacacaatttctcccacaattgttctgctttaacaaaatcaccttttgccatattatctttcgccatctcagtcaaagcataaatagaatcttcattatttttcaattctccaatgatactggagatttcttcttctgaaatttccggtttttttatttgatgaatgtaagaataaagtgggctatccgttttaggctcattgatgacactttgaattaaagttcgaagctgcggaatacatttctttgcttctgcttctgaaatttcatttcctaaatgtttgtaacttattattctatcgtgtccaatatcaaacggtattttcccttcatcttctttaatgattattgtagaatatggacgtaatgcatgacgtactcctaattcgtatattgcattagggttaaaagttgatatgtctgcaataacaatgtcagcgtaatataagagtgcatacatacttctatcaattattccagattctacaatctcgtcagcgcgtatgcatttgcatccagcggattctacggcaggacggattatttttttatacgtagcatctaaatcaatagtacggttagtatctggatcctttttcttgccgaatcccattactataaaacataaattcctttccattatttataaattcatttaggtctaacaattacttcacttgctataggatgattacgcttattgaatgcttgttcaatataagcgttaggattacatttgaagtcatcccatttaactaagatgcaaaatcgatcatcttcatcatatgcacattttccgtgattatttaagtaataatttttactaaattctttaatagtagtcgcatcgttaatagctacagtattatgacttttaccacagatagagcatatatgttgtcctttgtatattgaatcatacattgaaggtaatacaactcctaaaattccgtttcgagtattaccttcgctattatacaatgacgcttgtagctctctctttataaatttctgttctttccaccccaaagtctctgcactctgtgccccaatcaagaagattgtaaccgttgaatcagacaaataatcttctctgatttttcgcataatatagtcttcgtcttcagaattaataggggtatttagcgacttgtctatcatgtcaactttttcattggcactccatttttgtatttctcgtttataccaactatcttctgttttaaaagaaatataacatttatgtcccatatgcttatgtttttgcgtacaaaaatacaaaaaagacccgaattatcgaatataattcactacatttgcactataaaatcatattaaagaatgaaactgaatagaataaagactgttttatccgaaaaaggtatttctcaaacgtggttagctaaacagctcaacaagagttttagtatggtcaatgcctatgcctgtaatagaattcagcctaatttggaaaccttgcaacagattgcggagatattacaagttgatttgaaagatttgataaccgataaaaaggaaaggttacaatagtatttaattaggttgggaggatcggagaccttttgcagtttattgcagatgtatctatgaacttccgataatatacaatattaagaacatgactcctgaagaaaaagcaagaataaagatagaccagtggtttactgatgcaggttgggaagttgtcaatagggatgcttatgaacctacttgtacggctgtagctataagagaaggtttattgaaaggaaatcttgaagcagattatttcctttttattaatgggaaagcagtgggcgtgcttgaggctaaacgtgaagaaacggatgcttttgcttcaaaagtatgcgagcaagcggccttatacgcaagaagtgttccgaatatctatcagacataccaaaagccattgccttttatctttacctcgaatggcaaggaactatatttctgcgattttcgtgaaccggattcttatttcaagccgataatggctatccctacgccacatgaattggttaagaaactggggattgaggatacatttgccggacttccaacattgaaaaagaaagggcttcgtgattgtcaatatgaagcggtaacagaacttgaaaagagtttccgtgctgggcaaaatcgagcgttgatggttcttgccaccggtgcgggtaaaacatatacggcttgtcttgctgcctaccgaatgctttcttatacacccatgcgtagagtgttgtttcttgttgaccgaaataatcttggaaaacaagccgagggagaattcggaacttttcgtctgacagagaacggggatgctttcaatactatctttacggtcaatcgtcttcgctcgtcttctatcccttctgatagcaatgtcgttatttctacaatacaacgtctattctcattcttgaaaggagaaactattgaggataacgataacgatgatgagaacgaaccagcagaggaggtaaccttgcctcctaatcccaacttaccgcacgattactttgatatgattatcatagacgagtgccatcgctccatttatgggaactggcgcaaggtgttggagtatttcgatacggctcgacttgtcggtttgacagcaaccccgattgaagagacaaagaaattctttaactataatatcattgtcaattataccttagaaaagagtatcgttgatggtgtgaatgtggattgtagggtgtatcgaataaaaacgcaagttacggaaactgggggagctatattagagggtgagagagtaaaggaagaaacgagatatacgggtgaggttaagactgtgagaaacaaggaaaccaaaacctacaccaataaagaacttaatcggagtgtcattaatccggcacagataaagttaatcctttcaacctattgggatgtggtttatacagaattgtttaatgacccgcaacgtgagccgaatatggactatttacctaaaaccttgatatttgctctcaatgaagctcacgccacaaatatcgtacagatagctaaagaggtgttcggacggactgacgaccgctttgttcagaaaatcacttattcagcaggcgatagtaacgaactgatacgccaattccgtaatgacaaggatttccgtattgctgtcacctgtacgttggttgccaccggaacagatgtaaagccactggaagtggtaatgttcatgcgtgatgtggagtcattgcctttgtatattcagatgaaagggcgtggagtgcgtactattggtgatgagcaacttcgcaatgttaccccgaacgcattcagcaaggattgtttttatttggttgatgcggtaggcgtgacagaacatgcgcaaacagtggcacctatagacgacggtcctacaacaaagacaattacgttgaaggagctgttagaacgtattagtcatggctatattcctgatgaataccttaaacggcttgcggcaacgcttgcacgaatatacaataaagcggatgattcgcaacggaaagagtttgtccgtctgtctcatgatgacatgaaggagctttctgccagaatatacgatgcactggagaaaggcattcttccacagtttgtaagcactgatgagcctaacaatgaacgtaaggggctagtcgctccgcttgccaatcatgcggatgcccggaaataccttctgatacttgcagccggattcgtcaatacattgatgccgggtgaagatacgcttatctccaaagggttttccattgaggaagcaaaaaatacgacagaggcttttgaagatttttgtaaaaaatactatgacgaaatagaggcactgcgcatcatttacaacaatgagggagagcctataacctattcgatgctaaaggatttggagaacagactcaaaatggcaaacaatcattttacatccaaacaactctggaactcttatgccatagttaatcctaaagtagtaaggcgttccactaccaaagaagaaagcgatgcattgaccaatatcatacaacttgtacgctttgctttccaccaaatcgaacgattggatagtgtagttactacctctaaacagtttttcaatctttggttaggacaaaaccagcgtgaaataacagacaaacagcgagaggttatcagttgtattgtggattatattgcttctaatggagcttgtacggtcagggatattcgtgaagatgatgctacccatgcagcccaaatgattagagcgtttggtaatatgcagaaggcagacgaggcacttcattcactttacacatttgtagttttaagaaaagcagcataaagaaatggcaacaaataatacaacagagcaatcgctcaccaaaaaagtatggaatctggcaaccactcttgccggacaaggcattggattcactgattatattacccaactgacctatcttttattcttgaagatggatgtcgaaaatgtagaaatgtttggagaagagtcggctattccaactggttatcagtgggcagatttgatagcacttgatggtctggatttggtaaaacaatatgaagagacccttaaattgcttagcgagcaggataatctgataggtacaatttatacgaaggcacaaaacaagatagacaaacctgtttatctaaaaaaagttatcaccatgattgatgaggagcaatggctcattatggacggtgatgtgaaaggtgctatctacgaaagtattcttgaaaagaatgggcaagacaagaaaagcggtgcaggacagtattttactcctcgtccacttattcaggcaatggtagattgtatcaatccgcaaatgggtgaaacggtttgtgacccggcttgtggaacgggtggattcttgcttacagcttacgattatatgaaaggtcagtcagcaagtaaagaaaaacgtgatttcttgcgtgacaaagctttgcatggtgtggataatacgcctttagtggtgacgctcgcttccatgaatctttatttgcatggtatcggtacagaccgtagtccgattgtttgtgaggattctttggaaaaagaaccgtcaactcttgttgatgtgatacttgccaatcctccttttggaactcgtccggctggttctgtggacatcaaccgcccggatttctatgtagaaaccaagaataaccagttaaactttctccagcacatgatgcttatgctcaaaaccggaggacgtgctgctgtggtgcttcccgacaatgtcctttttgaggcaggggcaggtgaaactattcgcaaacgcttattgcaagatttcaatctacatactatcttgcgcttgcctacaggtattttctatgcgcaaggcgtaaaagccaacgtgttgtttttcagcaaaggacacccaaccaaagaaatatggttttacgattaccgtacagacataaagcatacgcttgccaccaacaaactggaacggcatcatttggatgattttgtttcttgctacaataatcgagtagagacctacgatgccgagaataatccgcaaggtcgttggcgtaaataccctgtagatgaaattattgccagagacaaaacaagtcttgacattacttggataaaacaaggtggtgaggtggacgaccgttcattggcagaactgatggcagacatcaaggataagagccagaccatcagtagagcggtgactgaacttgaaaaactgcttgcaaatattgaagaaaattgagctatgcgaaaagatattagcacaaatgataaagatataaacgatctgttcttaaaggttgttgaccttgtcacgcaggcaagggaacgtgtggcaacagccgtcaatattgctgaggtctatactaagttccatattggacaatatatagtagaatatgagcaaaagggagagacaagagccgaatacggaaaggctgtactgaaagaactctctaaacgtctgactgataggctgggagatggatggtcgtattcaacgcttaagaatatacggcagttttatattgtcttttctaaagggctaaccagtggttgtccaaagtcgagccaaaaggctaaccagtggttagccgattatccgaaggcagaggaacatctttctgaaacgacattcgctctctcatggtctcattatcttatactgatgagggtggaaaatccggatgcccgcagcttctatgaaatagaatgtacccaacaacaatggtctaaaaggcaactcagccgtcaagtaggaagctgtctttatgagagattggctttgagtcgtaacaaagatgaagtaatgcggttggcgaaagaaggacaaactattgggaaaccatcggacatcatcaagaatcccatcacattagagtttcttggtctaaaacccgatgcagtttactcagagtctaaattggagaatgccattatcaacaagatgcagcaattcctattagaacttggcaaagggttcctctttgaagcaaggcagaaaaggttcacatttgatgagcaacatttctttgttgacttggtgttttacaatcgtttgttacaatgctatgtgcttatagatttgaaaatagacaaacttactcaccaagaccttggacagatgcagatgtatgtcaactattacgaccgctatgtcaaacaagactttgaaaagccgacaattggcattctgttgtgccgggagaagaacgatgcacttgtggaactcaccttgcctaaagatactaacatctatgcttctgcttatcaactctatctccccaacaaggctttattgcaagccaaggtgaaggaatggattgaagagtttgaagaaaatgaggaattaaagaaactggaagaaaatgaatagtaattgtgcagtttttggctgcacaattacaaacagatatacaacaatggatacaaaagcgttacgtcaaaagatactcgaccttgcgatacatggaaaacttgtaccgcaagaccctaacgatgaacctgcatcagttctgctcgaacgaatcaaggctgaaaaagaacgactgataaaagaaggaaaaatcaagcggagcaagaagtctgcaaagacttctgatacgccccattatgagaacgtgccgtttgaagtgccgagttcatgggtgtggtgcaggttagatgatattgttagttttcaaggtggttatgcctataaaagtaatacatatgttaatcaatctgattggcaagttataagaattgggaatgtcaagaatgacaatctgatacttgatatacagcccgtgtttgttgaagatgtaatcggtaagacaacagaaaaatacttgttgaaaaaggacgatattctattcacgatgacagggacaaaagggaaacgagattacttctacacggcaaaagtcccatcaattaaaaagaatttacttctgaatcaacgtgttggttgtcttagatgtttttcttcagaaatcaatatagatttcttatgtcttgtattgaaaggagaatatgtgttagatgcgatattttccacagaaacaggaaatgttagtcaaggtaacattggttcagaaagtaccttgaatttgaatattgccatacctccccttacagaacaacatcgtattgtagtagaaatagagaaatggtttgctttaattgaccaaatagaacaaggtaaatcagatttgcaaagcactatcaagcaaacaaaaagcaaaattcttgaccttgccattcacggcaaactcgtaccgcaagatccgaatgatgaaccggcaagcgaacttttgaagcgtataaatcccaattttacaccttgtgataacgggcattatacgaacttaccgaaaggatgggctatatgcaagttatctgatttgtgtagaattgagaatggctttgctttcagcagcaatgattataagtcacaaggaataccattagttcgtatatcgaatatcactcataatactatagatataactgactgtgtttatgttgagggcattacggacaataaatttaagatttcgaaaggagatttgctgattgccatgtctggagcaacaacaggaaaaatgggagtatatttgtttgatgaaatagcatacctaaatcaacgtgtaggaaatatcaaaatcttaaacaagtcctcattgtttcccgattatcgaaatatttatatgcaatcgaaagttgatgaaatactaaaaattgcatatggaggagcacagcctaatatcagtgcttctgttattggtaattttgattttcccttaccaccatataaagaacagatacgaattgtagagactgttcaaagaatttttgaccaattagatactatcacggagagcctataaactctccgtgatcaaatccagttgtttaaacgcaatatttattgccattacaatcctttgttgttccttgtaagatggaataggaacttctattgctttgaataatttcttattcaagtggggaatggcagaaccaaccttgctttctcgcaagactttcctatgcaagttgataatttgtagtacatattcttcgttcatattttcgttgataagtaactgtttgaaagtactaccttgataaccgtcaatcggagtcctaaatacctcaccagagttctcgccatctactaaaatcaaaagtgaatttgcagtaacatactttccagaagtcaaagtcttggcatcacgctcacctcgcaaatatttgacatcaagatttgttcgttctatgccattttgcttatcaccatcaaccaaagagcatagtacttgcatcggtgcaacagtccatccttcgggcaactgcgtataatgcccgatacgtacctttatattattaccatattcattctaattcaatgtagtatggtaacaaaattcaaaaatcaattggcaaagagtaatttggccaaaaacacagtctcctcttatgtgtggacggtgcagtatttcctcaatcattatggagaagtgaacaagaaaaatcttttggcatacaaggggtatttggtggagaacttcaaaccgcagacagtgaacctgcgcttacaaggaatcaacaagttcctagagtttataaaacaggagaaactaaaagtgaagttcgtaaaagtacagcaaaagaactttttggaaaatgtaatcagcgatgccgattacaaatttctcaaagcccaacttaaagccgatggttacgatgaatggtattttatcgtgtggtttatggctgctacaggcgcacgtgttagtgaattgctccacattaaagcggaacatatcaaggtgggttatctcgacctgtatagtaaaggtggaaagattcgacggctatacatcccaaagaacctacgaacagaagccgataaatggttgaagaatcaaggcctgacatctggctatatcttcctgaaccgtttcgggcagcgcattactactcgtggaattgcttcccaactcaagcattttgccgaaaaatacggaatgaacaaggaagtagtttatcctcattcattccgtcatcgttttgctaaaaacttcctcgaccgctttaatgaccttgctctactagccgaccttatggggcatgagagtatagaaaccactcgaatctatcttcgtagaactgctagcgaacagcagaagattgtggataaggtcgtaaactggtaaagccgcattagcccttagaagtgtattgatttacacttctaaggctttttgaatattatcaagaacagagaatagtttttttatcttttgaacaatgcgttgttgctcggcaagaggaggtagtggtatttcaattttatgcaaagcattagaagatagtccaagtaatcctatacctttccctcctatcaaattgttctcttttaaatacgccaatgtatagtagtaaaatggtacacataaatcaatctttggacgaagtctatgaatgtgattttgaatgcaaatatcgtaatcatagttccaaattgcagagcgtccaatatcgccgccttcacacacaagtaaatccccctttgttacagtgcatttatctaattcactctctttgaaagacatttgctttatcactgtaaaatcaaacttattccaatacacatttgaagtagtcaaataatctttcattacaccgtccctgttgactgaattaagggctttacctgtattatgattaaaaagttcccctaaaattgtttgttgccatcctgcgggataatgcccgttatcacaaggtgtaaagccgggatttatacgtttcaagagttcaatggctggttcatcattcggatcttgcgatacgagttttccatgaatggcaaggtcaagaattttgtttttggtttgcttgataatgttttgcaaatcatttttcccattctcgataatatcaattaacgagaaccatctttctatttcagctacaatacgctgttgctctagaaatggaggtaaagggatataggtctttactattatttcttttgaaatgttcggttgggctccgccaccaccttttgcgatgaatgctgttctttgagacaaaaggaaataaaacaaaaacattgggtcgatagcatcgtattcaatacaagcacaacatgcttggtttgttgttgccgggaatgtaagaatacccagtttgccaatcgtcgctccatacattgcaattaaaacacttcctacaggatttaattttgcagaagaattcacgactgcttcttctgtaataaattcaggaatatgagtaatatatccatcgtttaagtctccagttttaagccaaggtatattcccaccataatatgatttatttgaacggctaggtgttccgcctgattgccaagtaccgataactcccaaagttgtccacatccatccctccggcacttcaaacggcacgttctcataatggggcgtatcggaaagagaaaaggagaggaaaaatcccctccttaacttaaagaccatgtatcagatatttaaatctttcagtgctagtgcataattgggacaaaaaccgtccattatacactttaaaccaagtgtctgatagtacttgtggtcatcatcttcggtacataggtatttgtaaccatagcgtggcatgtactccttgaagaaccgagccaagtctttcaggctttcttcttggttctttttgaaattactgcgcacaatgatgatagaccagtcgggaaagttgcctcttccacagctatactcccagaagcggatatagcagtctaaatcacgttcacgaatgtccacacaaaagccgttggcatgggacatcacgctacagctttctctgtagccaaatttctcacacaagtagagattgaaatcaagaattaaatctttttgtaccataaataattgggttttaaaaattaataaatagagaattataaatgaaagcctcgcttacgcttagcctttttctttttcattaggcgattgaactctgcttcttctgcggcagtggcatcgtaggatgagctaccgtttagcaaaccgagactgatgccaaagctatcatcggaatgggaaacgctttgctgtacctcttctttttgttgtttggattcctgtttggcagactccaacaaagatgcacaagcattctcttccagtcggttgtcgatattcaagtagctgaactctcgacctacttttgagccggagaaagaaaagccgttatgttcaaacttgacaccttgtatttcccgtgtagtccggctgactttgaatttcatatcaatctcccggtcggcaagcgcatctttcaaattatcccaactatgagctgtgggcagttcttctttcaatgccttgtatatctcgtgctttgccttatcgtatgggcgcaagcgttcctctttgatatggtctttaccattggcaaagtgcaagcgatatttggcggtcaacattttgcaaactttctcattcctgcgaaaatcattcttgtcgctaatcgtcttgccatcattgtccactcggttgaaaacgatatggcaatgcggatgctcacggtcgatatgccgggcaatgatgtattgcgtattttcgatgcccatcagtttcatatagtcgtgggcgatttgcaacatcaacgcatcatcagacttcaagcattcgccatcttcaggagagaagttgagcgaggtgtgtccgacaatattctttaccttgtcgttgagcaacgcctgtaattcaaattgctccgccatctgttcgggtgagccattcactccgacagcttccagcaatttggatttctcctctttgaggacatagcggacacagccactgaacgatgtccctttggtctgcttacctatcatctttcagttgctttatgagttggttaatacgctgcgccatctcctcgcatctttcggcaacagcaaagaatccgtaggtgtttgcctgcttcgccaattggttaagattggtgctttcacctatcaactgacggatgatgtggatatgctctttcgtgattcgttcacgtactgttccgctctcaatgagcgaacggatgactgcgctttgggtctgcttgctccgtctgcaaagcgcaccgagccatgcgaattggtcgtatgacagacggagagttatcgtatatttcttttccatttggaattgcttttagtgaataatttgtgaccatcgggagctgcctcctcagactttttgaggagcaagtggtcgggaaatgtaatacaccgacattaacttgctacagtaaaaaagtctcgattcctcttccggtattcaaagtctgaatcctcgtttcttaggctgtgaaactttcggcagcggagtgtctttttgtatgctgatgagcttcagatcgaatatatctatcagtgttttcaagactggatttctctttatcatctgttgcaggatagcttcgtcgggcttcactttgagcagataatcggctatgtcgtacccctcttttcgctcgttttcggtggcattggtttccatataatcgaacattcgtacctcaatcccgtagcttttcatcagaccgattttgctctgccaatagtcggtcgcccccaaatcggggaataacacaacgcttcttcctaccagaacggataggctgttggcattgaagcaaccgttctttccacctgatgctatccatagaaactgcggcagatagtaggaagcaatgagtgccgttttctcgctttcgaccagtgcgacaggacggcttttgtcttcaggaagcagatgctcaccgaagaagcattgcttcaaattgtaatcacctttgtgtaatacggagtgcacccacgtaacatgattgtatggttcttttatccgcttacctgtttcggaattgtaaagcattatcttacctgtacggattttattctgattgtccgtttgccagaatacggttgcaccgtcccaatacttggaagtaccaaccttgtatcttttcatgagttccaatgtctccgtctctccgaactgagccgatagaaattgaaacaacttgtttgcagaatagccacgcaatgattggttgactatatccaaatcaatgtaggaagtagctattggttgtgcttccttaataggggcatagttcctgaaactattctccttctccgcaaacttttctttctcagacgggttctgctcaaagtaatcacgaggcgtgaagtgataaccgcatttctgctcatggtcacaacgccccacgtactcagggaactggatttgcttctccgtatcaatgtacttggaaaaacatctttggtggtggcagttcgggcaagtgtgtcgagtgctgacacctttgtagggttctaatatgaatctatgtgtactcattgtatgtttctttttgggtgtgtcacttttgtcgttattgtcgttttcgctggaaaagtgtcaaaaccgacaaaaatgtcacgggttaatctttgaatattctccatgcttctctttgcggaacaatgtcccgatgttgtcattgagaaagcgttgaaatgtgcgctccttcattccattttgctcggctatctgtatagcttgggcagttgtaaaggatggaggaagtagattgactatcgcctgttgttggctgttgagcatgttctcattgagtatattttgaacgctcaatgcggattccttgaaatactccgtcagtttaatggctcgttctaccgtcaacaggtcgatatatgttttaccacactctccgcaggtccatcgcgctaattggataatcaggcagaaacggatgatgtatatctccagcttgcaatagatactcacaatggtgtcatttgtctcttggtcgcacaattctgagaagtggtgctgccattcgtaaagccgtctcttggcatcctccgtgaaaagaagaatctgcggttctatctctccaaactcattgagggcatactcttgttgtatcagtttgtcaataatggcattccattcttgttcgatgttctccggtagttccttgtcattccaacgagccttctgttgcagattgggcatcacaaacagaatgcggtcgatgaatccgttactggaacgttcacctttagccaactcactgagaatcttcttttgaatagtaccaataactgagatatacggtcgcttgatgaagatggaactcttggcatttttgcggtcggatatagtggtcttggcactgaacaccgacagccagaactgttcttccgaaccgttgttataacggttgaagttcttgaaccaagcggataactcgtcagcccacaagcataaaccacgtttgttttgcgcatggataaggctcaaaccttcaggcgttacatccgaaattaagaagcgtttacgaactggctcctgaggaaattgttcttcaccgctttccgctcgttctttgcggctcatactcatcagttcatcatacttggcaagagccttttcaaagacttgattctgctgatagtcgtaatcaagaaacggtttcatcgcaaagctgagcggatgacttttgtttgctcccggtcttcctatcaatgccatatacaggatagggctttctatccagccttgcttgatttgggcaagatgcgtgttaccgatgccaactgcaatcgctgcaaaaattgcagaggcaatgtagtcagtcgggtagttatggcattcgtgaacctcactgatgatgcgttggatttttgtcgggaatatgctgacaggaaaatcagtgccagccaatcgcatacttaaatcaaccgcttcgtcaatgatggatgccggattaatagaggatgtatccatagttctactcattaaaacttcatggatgatttggacttatgacggacaccgccttgcatatttgccagcatctcctcgtaagtctgttctgcactctttctacgcccgttctcaatccaagaaagaagttcgtcttcatagaaatagagtttcttacctttcttataggcaggaagcagtcctttgcgtaccaatgtataaatggtaggcttggcttttcggatgatacggcaagcatcctctatttctaccaacacatgtttgtcagatggctgtggctggagttccgctaccatctttttcaactcgatgacctgttcggtcagataacctaccgcttcgggcagcttatcaaatgttactgtttctttttgcatacgccaatcgtttttaattgttcgacggcaaaggaaacaggtgtttcaatggtggaatcattcaccaaaatataactgatgaataactttttgatggtaataagtgatgattacgagtaatttaagtacctttgtgtcatgaaataccagtggttattgaagctataaaacaaatttgtcgtttatgataccgcaatttgaagaaatacggatacaggcattgaaagaattaagtgccgggatagttatgagagctaaagatttacgcattcctttggctaagcattttggattgaccgatgaggaaatgaatgcttggtatccttctggtaatggcgaaatattcttagaccgtatttcgtgggctttatcgtatctttttattgcaggtcttgtagaaaagccccaaagaggtgattataaaatcagcgaaaagggactgtctatgctttcttcatgcacggagaaacaaataaatgagttcatcaaagtaacagtgaatgcgaaaactccgaagaaaagttctaaaaataaggatgctaacaacacttcttcccatttgggaaatgatgatgaacgtacaccggaagaagaattagctgattcttatgataggataaagcagaatgtgcaatctcaaattctgacaactatattaagtaaaaagccacaagaatttgaacggttagttgtgaaattacttcaagcaatggggtatggtggcgaggtcaaaaactcaggtgttgtaacgaaactatctaatgatggtggtatagatggtatcattaaagaagatattttaggatttaatcatatatccatacaggcaaagcgatatgctttagataataatgttcagcgtcatgaggttcagagctttgtaggagctgttgcaggaacaccatccaagaaaggtgtattcatcaccacctctgattattctaaaggtgcgatggaatatgtggaaagccttaacggttcaccaactattatcctgataaatggtcagcaattaacagaatatatttatgactatggcttgggattgcaaacagagaaagtccttaaagtcatgaaaatggatatggactactgggatgcaatggacaatgcctaatggtattgcgttatgcaatttttctatctaatttaatcttgcattctgattctgtatgcgacattttacgttcaatagtagatatttccgaatcacggagggtatgggtaaataccctctttataaaagtggcggtctgtaagcgtggcttactgaatgccttgccgatattccatccaaagtgcatgatgtcaatggtctttaactgagaatcgacctttattggttcaactttaggcagagtatctaacaagtaatattctgccacatatccacacaagcgattaagtgccgtttcatcaagataggaaaccaaagtttgttttgtgtatgcgataaccttattgagtttttcttgtgaggcacgttctttctctgccatagcgtttgcacgaagagtctcgtattctgatggctggtcggattcttcgatagatgtgttgttggtagaaggcgtggtttcctcctttggaagttctgccacatcttcgttgggttcgtaatatgatagagtagaaacttcttctgttatgtcagatgtagtttcgatttcaatttcgggttcaggttcagaaatgataggttttgaatttatagaacttccggcaagttccgagtttgctgctggagcttctacgactacagccttgttgcgatagcattcaaatctcataaagcacttctctattgtaggtgaaaggagttgtctgaataccatttgcagattgagatagatagctcccatgataatggagcttaccactaaaatgaggtagctgctgaactcatcccaaccatagtgtagcacggtctggcgggctaaaacaccaatgattgcgattgtaccaaaaacaatcagatgcaatgttatatgttctatctttttctgctccatagtggtatgtattaatcgtttgtgtgcaaatatataggattaatttttgaaaaaatccatagttttgcctgttaatgggcttttgacgatatatttcatcacttttcaccacgttacactcttaataataagcgcattgcaaatttcttgtttttggatgaaaatagttgggtaaataggcttgtgtatcttaaaaacaaaaattatctgcatcatttaatgtaaacaatgcagataatcaatagggtatagagatattgcttattagcaatacaatgtatggtttgtatccttgttgaaatataacaagaggttgtaatcttgtttacgagcgactttgtttattagctatttcctaaatgctgcggaatgcccggtgtctatctgataggatagggctataaccatatcgagattatacacatcggcattgttcccattctccaatttgatgtacttacaaacttcgtggctcctcaaaacattagctttcaggattctcttaattgctgcatggatagtccaagcagttgtataaaacaagtctgcaagctcccaagcggtcatccatatttcaccatcggaaatatggatgctttgttcgttgtttgttatgattcctcgtttcatagttatatctatttgagtgatattttattggctgtttctcgtttcttggaattgaccaaatcggcataaatctgagttgtggacacattcttatgcgttagcatctttgataccgtgtaaatatctgtacctaaggatatttgtatgacggcgtagctgtgcctgaagcaatggaagcttatcggtttcgttattcctgcttttttgagccagcttttcagcggataattaatcatgctccgtttcaaatccttgaatactttgcctgttccgggtgttccgcatagttcgtaggcttcgtaactgatggggagtgtcgcttccgtttgtgttttctgtgtcctgatgcgcaagcaataaccttggtcgggagcgatagtgaaatcttcccattgcagattgagaatgtcactgatacgtaagcctgtcagacaagcgaatagagaagcagctttcagaacaggaatgtcgcaaggtgtggcagcgagttgcttcacttcgtccagcgtcagatactctttcttcacatcttgtggctctattttatcaagatagtcattgatgttttctcgaaaccatttgtctcgataggcaatctttaacaatcctctgaatgtagagtagtagccggatgccgaattgagggaaatgtggcggttgctgtgtttgagttgcttggcgttcagcaagtactcacggaacttcttgcataaatccacattcacatcgccaaaggtacattgtcccttgacgaagttgtagaaatgctgatagacaaactgccatttctggtctttattccggcacattttcttgaagtaggcgaggaagtcggctttctgtttggtcttatccaagaagccaaactcttcattgatgagcgattgtacccggatgcagcggatagcctctgccttgttcaacatatcgttgttgaactcccgttccatttcgttcttcggatgggcatagatgtagatgccgaggtattccctgcggctcatctgcatcgtttcggggttacggactgccggataataatccagatacaaggagatgcgattattccgaatcgctctctgacgaactgttacttttgtacatgtgtgtgacatactgtttgatatttagaattttacatttgtttggtgcaaaggaataaggtgattcaatggtgggtatattcaccaagaaataacttattcaatctttggggctgcaagcaacttatctaattcgggcttggagataaacgtgtatttgcctttcttgaccttggggatattatggtacttcgcatagtgatagagttggtcacgagtgaggttgaacttctccatcgcttcggctaccgtataatattgcggttcttctggtatggcaattcccttggctatatctacgtgcttcttggaatagtacaccatgatgccctctttcttcttggggatggcattcttggaaacgaaacaatagatggcagatagggtcatgccgaacttctcctgcatttcttgggagctgtaccattcggtaatgtctggattcggggctttcttggcaaagtaagcgtcaatatgtttcttgctccagtaggtcttaccacgattgaaagttcgggggatgttgttcttcttggctaccacaaatatccatgactcgtttacatgatatttctctttgacttctgcggtggtgtagaagtcggtgataggggctttctcaatgggtactctctttttgtattccgctgcattttcaaacagaagctctatatcttttcttctgactaatgtcttacctttgaattgaactacttttatgatgttatctgccatatagcgataaatactggctcgactaatccttaagagttttgctgcttcaggtggggtatagaattccttgtcctcaatagatggtttttccgtctttattgagaactctttttgataagtcgctatacgctcttgcctaatccgttctttataggctgcattgttgcacctatgagaacaatagttcgtagtcgttttgcgagctatgaaaatttgcccacaccatttgcatttcttcttgatttcgatgttgctgctcattcttttctccgtttatttctccaattttgtttcagtgcgtctcaccacgtctcactgtgtctcaaatctctactaccttgctggtgagaaacaaggctttaacaagcgagcaacaaatgcggtacaaaaatgagctgaataagccctataaacgataactatcgcttataaggctaaaaagaaaggcgctcaaaatgaacgccttgataatcgttgatgatatatgctaatcgttggtaatcaccacttacttgccgatgcagcatacatagctgcttgaatgatagattgttgcaatttaatcggtagaaaagttgtttttgagccttttggacttgtttttaaggctatattacactcttttcccaatgaatcagaaccatgaggaaatattgtatcctcaatgaagttcacctatcttctatccgactacaaaggtacaaaattccgtgatgttttcgccaagaatgccaactaaatgcaagatattctcacgtatattgtttgctgaccaaaagagaaaaatttagttgaagccttttcttccctctgcttgacttaactttattgcccgtgtatataatgacggtcattaaagtcaagttgagaggtagagtcaagtctttttcttttggcgagcaaaatagttctttgatatgatgagtgtatgataaacaatttgtatcgtttgtaacgaataacatattgtttgttgataggtgtatatggtgcttacaaacaatattatagcatttagtttttggaaatttttgctcaaaatagattatgtatatggttaattatgccaagacgtgcgttttttctatgtgtaatacatcattaaataaataaaaagtgttacctttgtatattatatgataggttggctatggcgaagtcatcgacgtagtcgctttgcaccttaaataagaaaatatggcaaagaatacaatgggtacaaagttgccccgaaaattggagcagaagatgcaaattgtaggtgagcagattaagttggctcgattgcgcagaaatctgagtgtggctcaggtggctgaacgcgccacctgttcaccgcttactgtgtccagaatagaaaaagggactccttctgttgcaatagggatctatctacgtgttttgtacgcattgcaacttgacgatgatattctattgcttgccaaagaagataaaatgggaaagtctttacaagatttgagtttgaaaacaagagaacgtgcatccaagaaagaataatctatgaaaaagttgtatgtatatgccgatttcgattggctcaaagaagtggaactcattggcgaattaggctttgagtctcttcgtggtgcggacagctattgttttacgttcaataatgaatggttaaggcagcatagcgatctgtttttgagtgacgacctgaataattacccgggacaacaatatacacaaccggacaaggatatattcggatgtttttctgatgctttgccggatcgttggggacgtactttgttgttgcgtcgtgagcaattagtagcagcggaagaaaagcgatcagtacggagattatcatctttcgatttcttgactggtatcgatgatttctcccgaatgggtggattccgttttaaggaaacccctgatagtgaatttataaatgtaagtgaatcgttgaaaatcccacctctgacagatattcggggattgattgcagccagtgctgaaattgagaaaagcgaagaaaataatatgctccccgatagaaaatggattgcacaacttgtgcaacctggaacatcgttgggaggtgcaagacctaaagccaatgtaatagacacggataaaactctatacgttgcaaagttcccatcacgtaaagatgattacgatgccggactttgggaacatttcagccacttgcttgctacaaaagctgggataaatgcggcgacaacaaaggtgctgacaacaggagagaaataccatacattgctctcgaaacgttttgacagaacacaagaaggcaagcggattcattttgcatcagcaatgaccttgctgggactggaagatggagataatgcaacaacaggacacggctatctggatatagttgactttatccttcagaattgcacagacgtagagcgcaatttgcaggaactctatcgccgtgtagcgttcaatatctgtataggcaatagcgatgaccatttccgcaatcatggttttcttttgactgcaaaagggtggatattgtctccagcttacgatatgaaccctactttgagtgaatttcaaagcctgcttatctcagccacttccaataaggcgggtttaagcatattgcttgatgcctgcgaggattatatgcttaatcgaaatactgcagagaagattatttcagaggtgattgaagctgtgaaaggatggtgcgaattggcatcacgattaggaatttccaagagagagatggatatgtttgccggagtgtttgatgcaaggtggaacgattgcgtttgatttacaggaatagaatattgttggtaaactgttgctgtccatgcttttatagggtggtgatggataaattttatttatatgaaaaaatcagatatattttggcagacatatttgagtctcgaaaaagagttcattaatgtttctaatttcatatttataacggatgaaattacaactcatgagaatggtaaagaaattactaaaccatgtaattcccaattggagacgttttcaccccatatagcagatttacttatacgatgctgtgtccaaatagaagcaatttctaaggaactgtattacgacaatggcgggtcaaaaccacgtggagataaaagcttgttttttgatgaggattgcttaaaacttattgatataaaatgggtgatacatgataaacgagttttggttgttgctccattcttcaatttgaccaaagaagaaaatctagttctaagaccattaaagaatgcccataaaagagctggtacattttgggaaaaagcatatcaagctgtaaaacatgatagatttgcttctctcaaagatggcaatataaaagctcttttacattcgatggctgcgctttatctattaaacttatactatagaaatgactcttggattgttaaatatcaagaattatccaagagtgattttagtatggggtcttcaatctttgcagtgaaacaaccagaggttggtcaattatggtatggcaataccccaaccataagtgaaagcccttatgtcgtaagataccaagcagaagattacaaacgaattgaggcaatgcaaaaagccgataatgaagcattaaatcattattggcagcaacagccagaaatcagggagcctgagtttttggcaatacttgcatcagaaaggaaaaaacaagaattggatcctactcatagaatcttatatctttgggagttgggtatttatcgattaaaaaaatgttacccacaaatctgccgtttgaggaaagaaaagaaaaatttatcaagagcgaggcttggaattgttgggtaaatcaacataacattcatttaaatcctgaagaaataacggaaaataatattgatgaggagattaagaatgtcggtaggcgatggggcatggatatggaaaagcagtataataccatgagttggattcatttagcgatgaatggtgctatatgtaaagtatatataccatgattcattttaaattgaacgctacatgttaaagttcctgtgtcgtgagttgtcggcattgggtgttaaagaaccgcaataccatttcgttgcctttatcatgaaagcaattgtttgcgtgaaggttttggagaagggacaagaaactaacattccgaccaaaagagaccagcaaacgaccagttagggcatgacaatggcataactggggcgcaataggggcataacaagatactttctctatagcagaaaaccctcattagtatttctacattagcgaagcaatgcgaagtttcggagaaagcaatgaggataacactggagcgcatgaaagcagggaatgttataaaacgagttgtggtaagttttttggggacattgggaaatccttttatcaacatctaaggaaacaaaataatatgaattatggcaaagaaagcaacaaataagaaagatggcaacacgatttggaatttccaagagagatgaatcttttgccggagtgttggaggggcgatgtaaggtggaataattgttatggtgtgccaaatcaccaagtaaaaatgcgccaaattaccaagcgacacgaggtagagggctgatttgtatgtagttgagttatagggtgtgggcgaactttgtattatgctgcgcgaacataatgtttgtgcagcataatttttttgaaaggtgaaattcattgatggaatggataaaaacgatacatgtgttcttttgcatatctttatgccaactgtagtcattcctttaaacgatgtttttgttgcttatctacttggctatatgagaaattaaatgtatctttgtttgctatataacgagtataatttgaatattgatgtcgaacaatcaacaaataatgatgaataggattaaggcagtactggctgaaaggcaacgaaccaatagatggttggcaactcaaatgggcaaatcagagaacacaatttcaagatggtgttccaataagtcgcagccgtctattgcccagctgcaagaaatagcaaaatggttggatgttgatgtcagaatactaatcacacctactaaagaactgtaagagaatatggaacaagctcaatataatcagctattttctttcatctggaatattgcgacagatgtacttgtgtatgcctttgataaaggcgaatacaagaaaattattatgccaatgatggtgttgcgtcgtatcgatgtgcttcttgaaccaacaaaggcaatcttattggctcaaaagaaaatgcttgatgataataaaatagccaatcaagatccaatcttgtttaccactacagggtatcctttctacaatacttcactttttacaatgaagacattgaagagtgaaaccgatccattacggctaaagatgaattttaatgattatcttaacggtttcagtaaagatgttcaggatattcttgataagtttcatctccgtcaaatggttgacaaccttacggaggcagaacgtttagggagtataattgaaaaatttacagatgataagataaatcttagcaataagcctgttcttgatgataatggtaatgtgaaatttcctgcccttgataatcatacaatgggtacgatgttcgaggaactacttagaagatttaatgaagaaaataatgtaacggaagccggtgagcatttcacgcctcgtgattatgtaaaactgcttgcagatttggctgttataccagttgcagacaaaattaaagacaatacatacacggtgtatgatggtgcttgtggaacaggtggtattcttactattgcacaagatcgcattaaagaagttgctaacgaaagaggcaagaatgttcaagtgctgatatatgggcaagagcttcaacctgaaacttttgcgacctgcaaggcagacctgatgatttcaggcgatattcaggcatttcagtatgtacatggtacagagatgcgtgaatacatagcgttcgatagtaccatttcacgagatggacatcctggcgaaacttatgacttttgtatctctaatcctccatttggtactccttggaaggaggatctcaagaagcgaggattagcagagactgagaagaagaagtttacagacagtcgctttacattgattggggaagatgacgtggaaatatcatttatccctgatattggcgactgtcaaatgatgtttcttgcaaataatctttcacgaatgaaaaataccacagagttaggtactcgtatcgtggaggttcataacggctcttctctctttacaggcgatgccggtagtggtgcaagtaaccttcgtcaatatattattgaaaatgacctgttggaagcaattgtggctatgccagaaaaagacttctacaatacaggtattggtacatttatatggattgtaacaaaccgcaaggaagaacgccgtcgcggttatgttcaactgattgatgcgacagaaattaaatctccgttgcgtaagaatttgggagagaagaattgtgaaactaccgaatctgaccgacagcagattgtaaaattacttaccgactatgcagaaacgccgcaaagcaagattttcccgaacaatgagtttggctattggagtgtgaaggtatgccgtcctctgcgccttcgttttgagtataatgaagagcgtgaggctgaaatgtaccgtaaggagaaggatactgccgtttgttgtgaggtaatgacctttgtcaaacaatatgaccattcggctgatcatgatttcaatgctctgcaagagttattgaaggttgcaataaaagaaatgaagagtaagcctaaaaagaagcatattgatttactccagaagtactacactacaacttgtccggacgcagaaatcgtttttgactcagatggttgccaaattgcagacaaagcattggaagatactgagataatcccattccgctatgagggtggtattgatggattcttgcagaatgagattttaccatacacccacgatgcttggatagatgaaaagtttatacaagttggatatgagctctcatttacaaaatacttttataagccaaaggcattacgttctatagaggatataacacgagacattcgtgctattgaggaacgcactgagggtatgttggatgatattttgggtaaggtatgagacagtacgatgaatataaagatacgggtatagaatggttgccaaaattgccaagtcattggcaacttgaacaactacgcaagtatattcgtcaggtatctaagaagggatatcctgaaaaacaattgctatcagttacacgagagcaaggcgtaattgtgcgtgatacagaatcaaaagaagagaatcacaactttatcccagaagatcttagtggttataagtatgttgaagagggacaactcgtaatcaataagatgaaatcgtggcaaggggcatatggagtatcagattatgagggaatagttagtccggcatattttgtttgtgatttagatttttctattaagagattctttagtttagcgttaagaagtagtatttatattagtttctttgcgcaatattccaaaggaattcgtgttggccaatgggatttatcgccagtcgccctcaagtccattccatttttggaaccacctcttgccgagcaagagagaattgtgagttatcttgaaagtaaaaccctatgtatagatgcgtatgttcgagagagagagagagttacagctgcttaatgaactaaaagaggctgaggtttccaatgttatcgcacgaggtttgaatcccgatgtgaagatgaaggatagtggtattccgtggattggtatgataccagaacactgggaggttcgccgtctctcacaagtttcatatgaacattttatctcgaataagaatattcatcaccaaaatctgttatctcttagttatgggagaataattagaaaggatattaatactacggaaggtctattacctgcatcatttgatacttatcaagtggttgaggaagaaaatattgttttacgtcttacagatttacaaaatgatcaaaagagtcttagagttgggttagttaaagaagaaggtattgtaacttctgcatatatatgtctaggcgttttaaatgattcaatcattccttcttatttgtataatactcttcattcttacgatatcaaaaagttgttttacagtatgggagggggattaaggcagaatttaaattggcaaggtctgaaaaagattgatattcctctccctcctattgaagaacagtatgcaattgttgattatatcgaggataaatgtgcgaaagtaaactctcttatggctgaacttgaagcagaaatagagtatttgaaagaatataaacagaaacttattgcagattgtgtaacaggccaaataaatgtgcaatctgaattataaatagatgaagttatggtaactgacacatcagagaaaaatcttgagactatccttgtgagctatttgtgcgatgcacagggttacgaagagggaacttcagaggattataacaagaactatgcactcgatactgaacgcgtaaagcgatttattctctctacacaaaaaaagaaagctgagaatactgcctgttttacgagcgaagtatcagaacgcaagttttttgccgagttgaataaacaacttgcttctcgtggtattactgatgtgttgagaaaaggattccgttacatatcggagctcttcgatatgtactatccgttgccgtctgagttgaatcctacagctcaggaaatgtatgcaaaaaatattttttgtgtaacaagacaattgttctatagcaaggacaattcgaatagcattgatgtaatggtttcgttgaatggaatgccagtgatgacaatggaactgaaaaaccattacaccaatcaaaccgttgagaacgccataagacaatatcaaactgaccgtgatgcgagtgatccgctacttgtgcctaaaagatgtgccgtacactttgctgttgatgatgataatatccgtatgtgtacttggctttgcggtaaaagctcttggtttttaccattcgacaaaggtctcaatggtggtgcaggtaatcctgttaatcccaatggcttgcgcacatcatatctttgggaggatatattaaagaaagaatctttgtcggatatacttgaaaattatgcacaagttgtaaaaaagaaagatgagaagaccggtaaggagaaggtttctgttgtgtggccgcgctatcatcaattggaggtcgtccgacaattattagccgaaacgcgagcaaaaggtgttggccagcgttatttgattcaacactcggctggttcgggcaagtctaattcaataacttggttggcatatcaacttgttggtttactggatggtacagaacctttaatggatagtgtcattgttgttacagaccgagtaaacttggataagcaaattcgtgataacatcgcctccttcaagcgtttgtctaatcttgtcgcttgggccgatagtgcagaaacattgcgtaagaatttagagagtggcaagaagattattatcacaatagtacacaaatttccattcatcctcgaaaccattggttcggagatgaagcataaacgttttggtattatcatagacgaagcacatagtagccagaatggttctatgtctgcaaaaatgaacattgcccttagcggcaatgtcggagaaaatggtgaagacttggaagataagctaaatgctattattgaggggcgtaagatggtgaaaaatgcgaactactacgcatttactgctacgccaaagaacaaaacgcttcaaatgtttggaactgcctttgaacagccggatggcgaaatcgggcatcgaccattccacgagtatacaatgaagcaagcaattgaagagggtttcattatggatgtacttaggcactatacgacatataacagctactataagattgctaaagccatagagtctgatcctgagtttgaaaagaagcaagcccagaagaaacttagagcattcgtggagagccagcctgaaacaattcagcagaaagcttctattatagtggagcatttccatagccagattattgacaagggcaagatgggtggacaagctcgtgccatggtggtaacaagtagtattcttcgggcaatagagttttactatgaaatcagtcgcttgcttgaagaacgtaagagcccttataaggcgattgtagcattctctggtagcaagaattatggtggcaaagatgttacagaatctgacgtaaatggtttcccgtcaaaagatattgagggtaatatggagcgtgaaccgtatcgtatcttagttgttgcagagaagttccaaactggatatgatcagccattgcttcatacgatgtatgtggatagagtcctaactgatgtaaaggccgttcagaccttgtctcgcttgaatcgttgccatcccaaaaaacgagatacttttgtacttgattttgccaacgacgcagaaagcattaaaaattcgttccagcgattctataagactacaatattgtcaaaagagactgacccgaataggttgaatgacctcattcaagagattgaaagcgctaatatatattctgaagaggatatattcatactcaatgaaaagtattggacgggggcttctcgcgaggagattgaccctataatcaacaattctgtagagcgattcaaagagcttgaagagaatattcaaatcagatgcaagagtagcattaaatccttcttgcgtacatatccttttctcgcagccgttttgccctttaagagtgtggaatgggaaaaattaaacacatatttctcattgttgatacacaagttgccagtgttgagaggcgaggattttaccgaaggactcattgaagcaattgattttgatcaataccgaattgttaaaggtgaggagcaaaaaattgaactggaaaactctgatgccgagattgagccaactcctgtgggtacacctaaaggtaaagcagaactcaatatggcgagattgagcgagatattggatgagtttaatggtattaattggcttgataaggaaaaagcgaagcaacaacttgaggagttgcctgtgcgcttgcaagctgatgaagcgtttgtgaatgccgcccgaaatagcgacaaagaaacagctcagcagcaatgtaatatgtcattgatgatgattattgcacgaatgcttaatgagaatacagaattctgtagaaattatctcgacaaccctgattttatgaatttcattaatcagagagtatttaatgcagcatatgaaaacgcaaataaataagatatcatgaaactcggaaagattaaacgtattaatgacctgcgttctgtttggcagcatgaaacgaaggactttagtaaatggcttgcccaagaatgcaatttgcagcaattaagtgatgctattggaattgatatcgttttagaagaatgtgagtcttctgttggaagtttcaatgtagatttatatgctattgaggagagtgcagaaagacgtattataattgaaaatcaacttgaagacaccaaccatgaccaccttggcaagcttattacttatgcgtcagggaaaggtgcggaagtcattgtgtggatagtaaaacgcgcacgtgacgaacatcgtcaagcaatagaatggctgaatcaaaatacaggtgttaaaataggcttttttctcgtagaaattgaattatggcaaattgatgattctgcgattgctccaaaatttaatgtagtagaacgtcctaatgactgggctaaacaaatgaagaatgtcgctagtttaagcgagaccaaacagctgcaactcaatttttggcagcaactatcagagtatattaaatcaaatgaatcctttgcaaaggaattttctgcgagaaaagcacagccacaacattggtatgacttgagtgtcggaagttcatcataccatgttagcttaactgtaaatacgcagaaaaaacgtttaggtgctgaaatatatatacctgacgacaaagataaattcgccatgttcaagcagtatgcacaagaaatagaagagtcaataggcggcaaggtagaatggagagaagcggacaaagcaactcgcattattactctttattcttatgatataagtaatgaaagccaatggaactttgcatttgaatggttgatgaacaaggctttgatatttaaaagaattgcaaagcagtttgataaatagatgcctaaggatatttagatattttctcgcaaattagaatcattgtaagcttatgttgattaaaacggatatttcgagtgatttcttaaacttatttaccaaaatctttgaaaatgaaacattggaaggtggtaataggttgaatgtgtttatgttgaaaatatctaacaatcagtttaattatggtaatctaagcgaagaattagaaaatgcattaataacgtatgctttatctaggcatacatgtaatgaattaattgaacaaaagaagtttggaaatttagcttcacaagcaagagagaaattaagacgtgctaaaagtaacacaggagaattaggagaacttcttttgtattgcttgttagagtcgcacttgcatgctcccaagctgcttacaaaattagaattgaaaactgcttcaaatgagtatgttaagggggctgatggcgttcatttgttaaagattggcgatgcatcatatcaaatggtttttggagaatcgaaactacatggagatttgaaaagcggaattatctctgcgtttgaatctatcaaaacaatgttagacaacgacctcgacaaaatgaggtatgaagttcatttggtaaatacgaatttgttaaaagagacagtatcggaggactcgtatgaaatattaaagaaaatcttaataccaagtgagaatgatgaaaatctaaatcttgataattcttttggagtcttcctaggttttgacatttcaatgtcagatgatgaacgtcgtgttagtaatgctgaatttagaactattatatcggaaaaagtaaagtcaagtataaataaaatagtgccgacaattaatgagcagttgaagaagaacgagtttatcggatacaacttttatttttacattttaccattttctgacttggataaaactagaacggaaatcataaacaggctgaaaaaataatagctatgattctggcagataagattgcacaagagataatgggtagcgagtattttcaatcgctttttgtgatatgtatggaacgttcatattatcaaatactgaatttatgtaaatcaatacaatataaagaaaaagagtataaagatttattgagatttgccgatttattatcagcatcctctttttctgaagctcgtagctatgcgtaccatattataactttcttaaatagttcatataagaatgaaccatattatagaatggtatctaaatctgtatattataatcttggcaattttcctgcagttaattatttaactaaagaagattgtaacgaggctgtgcttccattagataaaatgatacaaatagatgctaagaaagccttacaagaggttccaaattcagatggaatatactttactgatactcaatatgatttatattcggggttaagtgaatctagggaatttagcttctctggaccgacatctatgggcaaatcctttattataaaagcatttataagtagaataatacacaatagacctcctgaaaatttagcggtaatagttcctactagagctcttatcagccagtttactctcgaaataaaaaaagacttgggtatacaactggaacgtaataaatataaggttgttacaaattcaaatatatcagaacttattcttgaaaataatacaaatctaattctcgtattaactccagaacggctgattagttttttgtctcaaaacgaaaatccttcaataggttttttatttgtggatgaggcacataaaatagcacaagacgatactaggagtataacaacatatattgctatagagaagacactaaaaaaatatcctacaaccaaactttatttttcgtctcctaatgtctctaatccggatattctgctaaagttgttcaggaaagatgagcagaattcttttaaaacagaggagaccacagttgctcagaatctttttttctctgatctgagtgagggaaaattttcatatttttatggtaatgagtttcttccaatatccaccaaaatcccgggaagtgccagaacggtaaatggctttcttgtaacttatgggagagatagtaatttggtgtattgtaatagtgtaagacgtacaattgcttatgctattcagtttgctaatacaatatccatagatgatgcaactagaacaaacaataaattaaagaaagcatctaaaattattggtgattatattcatcctgattactatttagcaagtatcataaagaagggggtagcatatcattttggcaatatgccacaattgatacgtaatttaatcgaggatttatacaagaatggagatataaaatatattttttgcacctctacattattagaaggtgtaaatatgcctacgcaaaatttatttatacttgataataagaaacatcggtcagaactcaaatccattgatttttggaatcttgccgggagagcaggtcgtatgtctcgagaattacaaggaaatgttttttgtataaaacataatgaatgtgattggaaaggaagctcattttttaaaagtaaaaaagttgagctcatcccaactgtatacgaccggataaataaaaatttgaaaagaatagaaaatcaaattaagaataatgaaataaagacaggaacagaggaagaaaaaagaattttgcgttatatcgccaatatcatttgtatcgatactttggaaccgaaaagtgggtataaaagtccaattatagaagagctaataaaaagaaataagattcagatattagaattggccaaaagtaaaaattctaatattgaagtgccattttcgttattagattcaaatgaatctatagacatcagtattcaaaatacagtatataagcagttgtttgaattacatgtcgataaaaaacagatcacattatctggcaatgtggattatgagaattgtcaaagagttcttgaaaagttttatcatctatataattgggagaaaacaaacattaaggaattgaataatgtgaatagtctaaagtactatgcatttattatgaatcaatggattaatggagtaagcctcaatcagataatatcagactctattaaatataaagagtccagccaatcatttatacgactgccttctggtgctaatgagatatttagctcaagaaagaaagagcatgtgaatattttgataggtgagattattcgagatatagaaaaggttattagattccatttcgaaaaatatttcaaccattacttctaagtattgaagcatattttgggagaagataacgcaggtgataattgggctgtattacttgaatatggaactcgaaatagaattgtgatagcattgcagaatttaggcttgtcaagatataccgcaaatatagtgtatgataaatgtcgagcagctttaatagttgaaaatggtaagctaaaagggtttgagaagtctttaattttaagtatgcttcgacaaaattcattggaatatgacgaagtctacgaattattataaaaggcaataatacttatgtcacaagatattcaattcatattatataaccttccggaaaaggaaggtaaggtgcaggtaatcatcagggatgaaaccatttggtgtacccaaaaggcgatggctcaactttttggtgtggatatgactgtcgtttccaagcatctcaaaaatgtattcgagtcgtcagagctacagcaagattcagtatgtgtaaaatttgcacatacttggcgatatagttttgtatcgattattgtataatttatggcaaagaatatagaaatacgaaatagtacagcagagttcctaatctttatgcttgagggcaaagaggatggaattcaggtgatgtataagaatgaaaccatttgggcaacgcaaaaggcgatggcgcagctttttgattgctcaactgataatattagcctgcacttaaaaaatatatttgcatccggagaactagtcaaagattcagttaccgagaaaaactcggcaactgctgctgatgggaaaaattatcaaacaatgttttataatctcgatgctatcatcagtgtcgggtatagggttaattctgttcgtgccactcaattccggcagtggtgtacatacgtgcttcgtcaatttgctatccggggatatgtgattgatcaaaagcgaatggagaacggttctttcattggagaagactattttgaacatttgcttgctgaaataagggaaataaggctaagtgaacgtcgcttttatcaaaaactgactgatatttatgctacggctatagactataataaagaagctccgacaactcgtcttttcttcaagaaggtacagaacaaaatgcactatgctgtgcatgggcataccgctgcggagctgatagtcgaacgagccgatgcaaataaggaacatatgggattgaccacttgggaaaatgctccgaatggaaaaattgtcaaaactgatgtgtctgttgcaaaaaactatttgcgagaaaaagaattggaagaaatgggcagaatagtcaatgtgtcccttgatatggcagaaagtatggctatgcgtcatatacctatgacaatggaagattgggcaaagcgaatagacaaattcattaatttatttgagagcccgatattacaggatagcggaaagttttctgccgaatatgccaaagagtttgctgaatcagagtttgaaaagtacaggattattcaagaccgtcttttccaatctgactttgatagatttgaaggtaatactcttcctgcattggatattgaataattataatgtcattttgaggttggcaaaatcgcctttgggatatggcagattcatgtcgttaaattggcaagcgttcgaacaatagttctgtgttcatcatctagtatctgcatttatggtggccgacgttactccaggataccacttaaaagcaagaaaagagttcacataagagttcataaaagaaccagtagggttcataaaagagttcgtaaaagcactactgaaatacacccccaaaccgcaataataccaaattcagcttgcagaggattggcaaagtctcacgagcgatttatcgcttggggtattgagttaccctaactcaataaggtttgtataatgggcaagccctgtgagcaattaagtatacaaatttcgtttttgtcgagaacggcataccgatggctggcgaaaagataaaaggctcaaataacgcctttttctcaccaatcagcttgctgagagatttggcactctcaaacgacctattggtcgcttggggtattaggctccccatacaagataatgtctgtacaacgggcaagcccatcaatggcagcgaccagttccgtggattatcatgaaaccagtcgttgcacttagactttgacttatatacgaatggacacttttagaataaagtcaagtggagagtcaataatggtaatccggcatgaaccgataaatgccacggctttcctgagccaccatccgtttgttcgtgagaaactgaattatcttcacaatcttgttgtgattaaatttcgttcctgccagttcgtaggcagtggtcagttcttcttccaaagccttatatcccgaaatagtttctcttccctcaaaagccagttcgagagccttgcgatggattgtttcgtggatgtccctataaggggagaagggttcctgtttgggacgacctacgcttttcttggttggcacatagtccggcagaagttcgggaagtgattggtcattgatgcagaaggcaaatggcagaaagtctttggaacgggtatgcacactttccactttgctgatgttactgtcgtccttgtctttttcgatttggatgacagtctcagccttgttgttgatttccgtgccaatgtgtccacgggcattttcatcgcttttgttctgatgaaggatggtgtgaagatgaatctggaattcgtcagtccactgcatgagtttggagattacgcatgtggcttcgctcggagaattaatgtcatagaccaagtcgcggattccgtcaatcaccacgaaaccgagaccatcaatctgactgatggcatcgtctatgatagccaaacgctccttcggattgaacttgcgtagagcgagaaaatagaaacggtcgcaatcctcattggccggcaactctgccagtttcatgatacgatgcatcacaatcatacaatgattctgactctgctcagtgtcaatgtaaaggatgcggttctttccttctgggaaatccgttgtgtagttaaggacttcctttccggacaaagctgctgccaccatagcggaaacattgaaagtctttttgcttttagccttgcctatggatgcactgaaatttcccaatgtcccgataggtactccgcctattttcagaacttccggctcctgttcatattccttttccaagctgagcattgtatcttgccatcttgtagcgacctgagcaagatcttcaatgagtgctatcgtttccatactcaccagcttttaggattggctttgcgacgtgtagttgcaagcattcgggcgtgttcttcttctatgcttataggcgattctccttttctgccgctttccaaccatttgtccaattcatcacgatagacaaacaagtgttttccttgtttgatgattggaataccaccatgcttggctttgtaataaaaggatgatttcgagatacctaaatatttgcagacttcatcaacggtcattggaacatgggtgtctttttttacctcgttatgctgctgatgaagtttttctgtcaacagattttccatacttgagattctctcgcagagttcgcttaccacttcaggcaggtcattgaaggtcagtttgtctttttgcatatataacattgtttttgttaaacatgctgcaaaccaacacaatgatgtaatgctgacaactatcagaaggcaataatatttcagtctgtgttgaataatcctaatcggttgaatttgctttttattcttgggcttctttcatacatttgaagtgataatctccggttttaggaatatcaagggctattttgcaaactccgcatgtccggagatttttagccagatatttaatcgaagcatcttttagttcatgtgggaatatagtatgtatgaatgttgctctatctataagagaaatgcccaatctctctccgatgttccatacgaaatgcatcagatcaatagaacggagggaattatctacttttgaacggattggcttgtataaatcaaactgtccgtgcgcaaaatactctatgttttcatgcagaatttcaagatcttcttttgagagaaattccgtcattacaaatgtggtatattcatgaatgacacgcttaatgtttgcctgcctttcggcttttttacgttcaatttcggcgatacgcacttcataattatccatataatcatgttttacaactaagttttccggatttatatccttgtcctttgggcactccggatcaatctccttaatttgttcgggtagaggtcttacttgcttgccaaaagacaaactcaattcattctttgtaatgaatcggaaaaagaaacgctgaagtactccacagacaagtatcattgccgtgatatataaaataactggagtggaatattccatcaggttgatatggcaactgagatataaataggagtctgttgcccagtaaaggatgacacttactgaaagtatgaaactggttctttgaggagagattttaatactattcgtcataaactgatactgtttgagttttacaataagacaaatgtatatgcagatttccaaatagttgctgtttgtaatggataatcgttcagaatttaagaaaaaatacgctcagagtatgatttgatgcaaaatatcatactctgagctataaaaatgggattacttgaaccttaattcttacttgcggattaaagagattctgttgctggcttcacgcttgttactgtctacaactttcatgtaccgttgtgtcgtggtgatacttttatgtgccatattactttgaatggtacgtatgtctgtgccggctgctccttgaagtgttgcgtatgttcttcggtaggagtggaaagtgatattcttggtaataccggctttgcgaatccactctttcatgggatgctgtgtccaacttcgtttcaatcctttaaatactaatccggttttttccggagaatagccgattaattgcagggcttcgtcgctgattggaatgatgtcctctgttttggtcttttgggtaattgtatggacacatttccctccggctgcaaagtcaacgatttcatgccattgtaacgatagtatatcgctgattctgagactggtcaaacatgaaaacaatgctgctgtcttcagaatcggctttttgcaaggtgtctcagccaatttgtaaagttcttccacacttaaatagtcttttggagtatcttccgtttcgattttatccaaaaagtcattgatgttggtcttgattagctgattgcgataaaggattttcaaaagtcccctgaatgttgaccaatagccggaagcagagttctttgaaatgcgaccgtcacgcctgagttgcttggcatttagcagatactcacgaaacttattgcaaaggtcaatatcaatttcttcaaaagtacatttgccatgaacgaagttgtagaaatggtggtacacaaattcccacttttggtcatgcttacgaagctgcctgcggtagtattccaaaaaatccgctttgagtttgtgtctgtcaaagaaatcatacctgtcatttacgatagattcaaagcgtcgacatcggatggcttctgctttttccgacatagtggcattgaagttacgttcgcgctcattcttgggattggcataaatataaatgttcaatccttcgtggcggatgcttttcattgtttcctggtcacgatagcccggataataatccagatagtaagaaagcatcccgtttttcaaaggacgtgttctcaatgttactgttttacattctaacatggttacaattattattagtttatacttgatttgctgcaaatgtccgtaatggcttgacacagacaatgctcatttttagaatcattttctggtctgcctaaattcagacttaagcttattttctgacacccattacatgattaaattccactttcaggaatctcacgaaacgacctttcttctcacgtttgatttcgtggaattgtagaatgccataaacagagtctctggaaagactgtatttcttcatggcttcctgcacggtgtagtactccgaagcattatcttcggcagtctgcttggataggtcaaaatgtagcttcgagtagaatatcttaccgtgttctttcttggacgggatgttgttgcgatagacatgggagcggatggcaccccgactcataccatacttttgttctatatcttcgggagtgtaccattcggtcagatcattatctgtcttgtatttggcaaaagcagcatcaatatgctttttgctgtaatagttgaactgccggatacggatttttgggatattgttctctcttgtatatgcccaaatccatttttgcgatactttgtacttttcggaaatttgctcggcagtgtagtactcagttatatcaaggtcatctttaattcttcttcgttcataggggcgcgttttaagcatcagttcaatatcggctctgcgaatgatagacatccttgcactgattcttgaagctcttaacttatcttctttgacgagtttgtaaatgtattggcgagaaacgcccatcaactgtgcggcttgtgcaaaagtaaagtagtcttgatggtcaagtttgcttttgacttctatcaaatcctgtaactcacgaagttcgagtcttcgttctctcatacgatgtttgtagccttgactggcacattggtggctacaataattagtggtagttttcttcgcaatgaatggcttaccacaccattggcaaattctttttacttccatgttgttttctccatatttttaatgaaaccatatagttttaatttcgctttttgtctacctatgtaaaccattgtcaacacatgttgttgactacctcgctgtgacatcgcggtttttggttcacttgttacgcggtagaaatacggtagaaaaatatggtgaacaacactatccaatcgctatgaactggattttgggtaaataaaaaagtcgctgaaattcagcgacttcattatagttggtcctaattcgttgcggttaattgcgatatatcatttcccgatgcagaatgtttatttgcccacgcaaacgatatttgtgttgtataaagcattgtatatcaatatgtaaatttttgaagaatatttttgggggacaaacgggggacaaaatttcgcataccaaaagaaagaaaaacaataaaaccacttcccaaaaaaacgtgttgaattgcaagaggcacggtttgtccctcgcaattattttgctttgcctctcctcgtccctcggatgtagagttagattctgtattatttcagaaacgccaaaagccatagtcttgcataccaaaagaaaaaagcaataagaccattctcgaaaaagcatgctgaaatgcaagggacataatttgtccctcgttgtattgttgtttgtccctcgcttgtccctcggacgaaagttaggtttgatgcagttaccaataacgtgagtaaagtaatgattgaataggtttagtttggtttttgtatatctaatcaagttctaaactaaactgcttgattttctcaatttctaaactcttgattgctttttcttttcgtcagcaaatcctcctttttattcgctattgcttgaaatgcgttttgccgtttatagtgctcctgttgcacacctactatcctttctcgtcttcacatcactttcgggttggcagataagaattgtgtcgcaaaggtatatatcccgtctttcttccttgcaaggtcaagcctatcggttcaaaccaaaatctccacactcggttttcaactgaggtcgtattttgtctgtgaagccttgcaggaagagccgggacaccttgcaaagcgacataattttaatcaaacccgaaagtagttgatgccaacagagggaaaagtaaaaaatcaaatcaaaagcgattatggcaaattatgcgaccaacatcttctacgcaagtacggagaacgagaaagaccttgataaggtggagaactttttggaagacacattttgcgactgttaccttgacaggtcggaagacagtatcgagggcgagttttcgtcaaaatgggactatcccgaaaaagagataaacaagatgatttctcttttggaggacaaagacaaaatctacattcgagtgctgacacacgaactatgtaacgagtatgtgaacttccaagtgttctctaatggagaatggtcataccgataaccttaaaaaactcactgactatgtattacgaggacgaacaagatacggacattatcgggtgcttatgcacattactgactccttacaaggggcatacagagggagaagtcgttggagactacggcaacgagatagtggtaaggctcaccaatggcaaggaggtggtggaataccgggatgaagtgctaatctatgactaatggaggattgctttatgatgacaccaatagcgacaaggtttgtggattgggatattcccgaactttcaaccctgcaagacagcaaggtctatcaattgagagtgcaactcaatgagggtacgccaatgagccgacaacagaaaaattggcttacgaacagcgtgaacagcaacacctatttcaaaagggctattccgctaatgggctaccgctttgacttctctgacgtactgaaacgctactttgtcaagcaatacggacatatagccgaatactatgctgtggacaagaccgctttacggacattcctttgcggtcggattgatgaaataattgagataacagattaaaagaaagattatgctgtacgattacagaaaagaaagcaaatcgcctatgcttctgactttggcgaatggcaagaccattgagggcgaatttattgatttgcggattgccaccgaaaccttgcccaagggtaaactgtggtatcatatccgacatacggacgatgattggagtgaaccagcctctctgaaaaacggctgtgtagtggtcaatttctgtggtacattcatttgtgaccctatcattgatttcccttgtggcgaggaactggagataacagaatggtcatacctgaactgaccgacatctggcagaatggcaatgtggggcaatgctccacattgttgtgtccacgccatttggaaatacatttccaatggcatcaacttttataattggagcttgcaaggcaagccgtttttcctcttatatattcatctttgacagtcaagtctccttttgtatatatggcatttcatatttcgcaatggcgatcgggctgctttgttcaacgagcaccggacttcttgccattgttttctttgccttgatttctccggttctgtcggtaaggtagaacgcgactattctctggcttccgcgatcttcgtgccattctgttcttcggctatcccttccatagcaaaatacctttggctgtgcagcgtcataacggattcagtattacggcatccacattgagaggacatactggattcctcgtctcatcactctgctcctttgggatttacagccgaagcgtacctgaaactttgtgtctgcggacggatgctgtcctttgtctgcgaaccttgctcacttgtttattcaccaatccatatcgttacagcttttggccgtgttattcctcatttttccgttgcaaagttagtatgcagccgggtacggctgaaagccttggtcaatggtgttgcttcacaaatcttcctttatctggccggaggttttgacggcttacgctgacaaaaataaagagtatttgattgctaaccttgtcgcaaccctgtaactgcactcacttatattggcagcgtaaaaataatttaattaacaacttaaagcattgtaacatgaaacagattgagaacaatttcgcagtatcaggattcgtaggtaaggacgcagaaatccgtcagttcgcaaatgcaagcgtggcacgcttctcattggcagtaagccgtcaggagaagagtggcgaggaaacaaaacgtgtgtccgctttcatcaacgtggaagcctggcgcaacaacgccaacaccgattcgcttgcccaaatcaccaagggtaccctgcttacagtggagggctacttcaaacccgaagaatggattgacaaggacggcgtgaaacacaaccgcatcgtcatggtcgctaacaagttctaccagacacccgacaaggaagaaactcctgcggagccggaaaagaaaacgaaaaaaggcaagaaataactcctgcctcgttccgacaaacaaagcggcttcggtcgcttttgtttttgctcgtatgtttacttgtcatacatctatgggttgcccattataagttttcacccatcccgtcaacggcttcttctatttttcttcgagagacttgctcggctgcgcaatgttgcacgttgctcctctttcgcaagacactctgccgaaatcgcccgatacaaaaagatttgccaaccgctccaagacttcgttttctcccggtaggcaaaacattttgttatttatcgggcttgcagaagaaactcgtttactgcccgccctttgcttgggttgatattttcgacaagagggagaattaaatactgatttttaagtccctcgctatgccagacatgaacgactgtcataggctgcattctgttggttgaatcttacctgtcccgctggtagtcgcttttgctccagcctccgaatatcactttcacgattttgatgaacacccacaatcccaatactgtaatgattacgtctcccatatcactgatttatttctgattactacttgtaaagatacgaaaaaaacgcgacataaacgaatgtatggtgttaaatatcaatatgatgaagcatttttttttgagaggatgtcatctgttcttggcctatgcaattccgaaaagttctatctcgaagatgagtgttgagccaccgggtatgccgggttgcgagaacttgccatatcccatttcggcagggatataaatctcccatttgtccccgatacacatctgttgcattgcgataatccaaccctcaatcagttcgttcaggcggaatgcaatcggagtgccaccccgactgctgtcaaatttctttccgtttatggtccacccggtatagtgggctgtgacgatactgcgtggtgcagggtgcttgccatcgttctttcccttactgatgaccttgtaatagatacctttcgggagtggctttactccctcttctttggctttcgcttccagccattccttattggcttgtatgtattcttttttgctcattttatttcggcttttttaatttgtatatgatatggggcatttctttacctcggtaaacaacaatatggctactacaagattccataccaagccgttttgccactcgaatggaagccttgttttccgggcggatactacaatatacagccggtaattccaagctgtcaaaagcataggctatgagagattcggcggcttctgtcgcgtaaccgttgtgccaatatgtgttgtcaaatatgtagccgatctcaacgacttcattcccgttcattgttgttttcataagtccggcctggcctatcagttgtccgctttctttctgtagaacggcaaaatatccgataccatctttggcatatcggacgagctgtctttctatccagtcttgtacatcatcttcgctgaagccatgctcccaagcgtacatcacttccggcttacccattattgtaagcaaagtatcaaaatcatcattggtaagtttgcggacgagcaatcgctcagtttctataatgtcggcttgtatgtaattacacttgctcatattcagtaaatcaatctaatgttctgcatgctgtttctaatatgtcaatcatctcagccccgtgttcatgacattgaaccttaatccatttgtcatttgaacttttttctataatatctcccataatgcgaagtttcaaacttcctttttgaaccattttgccatatgacttcatctttgactctggtgaaaggtttgaaaactttgaattgacacttcgagaaatgatacacagatttccaaatgtatctttgtcatcccatgagtcaaaagaaccgtcagatggattttgtggataccagtgttcaacagagttacggaattcgaattcaaaatcgctgtatttgcttttattattcttccataacaagtaatccagaaagttgaacacgatgtgaggagtcgttacaccaagtttgtagtcctttccatccaagaaattctccttggttgccagtgccgctatgtcttcagcctcgtttgttaatagggctacttcatcattctcaaacagccatagaacaagctcggttatccagtgcatgacttttggggatgtatacgatactcgaagcgcagactgaatcattaaacattctttattgcgtggagcatatgtcgtttcccattctttttcatacttcaactttgtatttgaataatatgctttctttttagatgcctgtccagatgtgtgcaattccttaagactccattcgccctctttgtcttcgccagtatattctctctttatgatgaaactatcaaaaagataacgtgtttgcaacagatgaataattatcattctggcaaaattttctttgttgttcttgataggttcattatctaatgttccatatttaatcacgttttcaaagtcagcaatcaatttcttgtcatcaagtaattcgcccaaatctttttccaatgacacatcgtagaaatccacaaaaaccctgagtgcatgaagcaagaagtacgggaattcaatgatgctttcaaagcgtatatgagtatcatcgtcaagtatgccatctacattgtcaactttgaatcttggcttaatgatttcgtttatggttgcattattctccgaatcctctgtaatttctaaacagtcactatattcactccattcattagcaggccagccattccactctccaccgaaaatgttttctctttctgttcgtgagaagtgcatttgaacatagcctgtcatatcgctacaagcattccatatccgtgaaaatagttcttgttcctttctattgttgagaaatctcatgagccgggctttaaggatatcatgctgttctaattgctctccacgggtgttcattatctcgaagtaacggtttaagtctgtatgttcaggcacttctatcttatagagaatcacatgttgcaaacgggaaacaaattcatccttgtttaatcctttgtcactcgtaaacttttgacggattgcttttataccattaaggatagactgatctatattttcctcataatcggcagaaggctttttgtctgctagtatttgttggatattagaaagggtatatttagatttagagcgacaatcaaaagagagagtctgtcctaattctccttccaatgctccttctgatacaaggtattgcaataaaagaaaaagtgttgtaagacgttgctgtccatcaacaacttcatacgttttaggtttatcttgtaccttggaaacaacaagtgaaccgatgtaatagttctcggatgaatcaatatcgttaatatcatcaattaattgcgctatctctttgtcttcccacgcataggctcgctgatagcgcggaattacatagtgagtatttgtatcgaatattgttacttcatccaatatttttaattcttctaccatattaattgtatccattaagttgacgaagttgtgcatataaattgttccaattttcactggctgctttgtcatcatttctcatgtcaagtctcattcctgagatttcagtatgtctacgcgcataagcaatcatggatattacgggttttacattgctgtatttgtcatcttctatacctatggcatatctattaatagtatcaaagcctaaatgctgcatatcaattctaatcatcatagcccaagtaaatagttttttcacggccatgacatcaaagttgtgaaaacggtcgtaatagcaaagcaaggcgcagaaaaagaggtttcgtgcatggttaagtccaactgatgacgatttgaaagatttatctaattcttctgctgaatccacatcttttccgtttgtaataatcagttcgatatcatgaaatgctggattcgttacaatttcttcttttatattatgcaacatcttcatatagtgatcaaccatttcaaaaaagtcacttcctgaaatgaatggctctgtgagtaggaaataaggcatggctttgttggctctgcgcgcgtaagtgtaaccatacttctcttcaatacctttatagatgtctatatcagcagaagtgaaattaccacactttcgacattttgcccaattccatatcgggaaaaggtacaagtcgaataactctctgatagcctttggatctttcgattcccatttcactacggcattctgcatctcatacttatcgtgaatctctctaagatgataagctttaagtaaatcatgcggatatagcgcacgaccacgtgtgttttgagaatcgaataattggaatgcttcatctattctatttactgtaatcacgacaacttctagaatgttttttagggcatcgttaaaaatggccttcactgtatcatcaacagaagaaaaccactctcggatagttgtatagttgtcatgtagattcttctgtgtaattttatttagaaacttgttctttagcagattacacgtaaaatcagaatctaaatgtaatttcaataaaaggaatgatagtatgcgctgctgtccgtcaacaatctcatactcattgttttcatttctatgaagaattactgtacctatacgatatttgaaattagcgtacttacggctttcttcaatacttttttgagtatcgagaatgagttctgttatgtttttgtccgtccatttatatggccgttgataatctggaatgattagattcttccctaataacttgtcaatagaccatatgtgtggtttgctattcattatttaaaaacgaatttgattgttacaatagttacacaataaactttattcttttgattcatcaagtgttatgtgaactttagaatgtgggcaaattccagctttaaatcccttaatcacatcttttaatgagatgctaaacgagtcagatatatagtgaatgtgcgatttgtttccatattctcctggttcattgcctaataacccccttctggtttgataaaagcaatgccaatgtttcccattgttaaggattcgtgctaaaacaaattgtgaaacagttattatttctttcatttgaccatctgttaatgatgtctctccatagtgttcaatggtattttcatcgcatagataaataaatgatggtaaatctgcacctatatatttttttggtgtatcttcaaatctgtaattgctgaatttgtaccctttatcattggcatataaaaagattgtagcgagttgttctggttttattgaaataccccttaatagagaaatttgttcttttttggatagttcttcttgaaatagcaatttaatattttcgggaatttcgagagaagtagctctagcaatttctttttcagctattttttttgatgccaacattattgctattggatctttgcatatcgtgtctaaattctgttcttttagaaccattgcttctattgccggatagattgattttgcatgaaaatcaattaaatattctctcacattaacgttttctacatcgtccatgacgttggcgataacatattttgagtcgttattgtaaattttactatgtcccataattagttttctttattctttcttttcccaagcggcccgctgaacttgcctcgattgagtgaaacaccgtatttattaagaatgcggaacaccgaactgcggctgttgaatccactcactttccagatgtcatcaatggaatgcccgttattgtacatcgccacgatagttttttcacgttccgccctgctgatgtttttctctttggtcggctggttgatattctgtttcagatggatgatgtgggctgaagccttgcgcagcatggcacattcctccggcaaagaaccgaacatctccagtacatcggaggctttggtttccggaaacaaatccccacggctgtcaatcttgtcgtgaatggagacaatccgaaccacctttacccggcagaactcgatgaatgtcgccagctcacgggagccacgcagggcattgctgaattttgagacaaccagctcgtccccacgctccagacttgccatcagttgtttccattgagggcgcagtttctcgtgtccgttctcttcctctatcacttgtacacagccgtattgctccatccacttcttgtcagtgtcgaagccgtcataaccggctgccttgaatatgtaacctacttttgccatagtgctgttcaatgctaaatgataccaagtgcaaagatacaaagtttaattcggttaaaatcatactcaataaaatatttttcaattattatactttgtattttcacttgttacgctcttgtttatttcgcggattatactcgtaagtatgaaaaagaaaatagattaaagttttattttagagtattatcatacaaacttttatacttaactttgccgccataaaccaataaaaatatcatgtataaaggcttgtttaaagtagaatcaatgcaaaaaccgaagagaggaaacttgaaatcatactcaaagaaatgtgcttcgtatgccaaatcttttgccgtatgttttgccattgtcacattggcatcatgcggagaaaagaccggcaacagtatgtttcagaccgttaaaaatgctgccgatgcttacaggtcatacctgtccgaggtgcgaaaggaagcaaacctgccaacagaccgtctgattgaaaaagtcaacgactggcagtcgcttcgagattcggtatctgcctgtgtcgccaaagacacggcaaaccgtattcacgccaattacgaaagcgaaattcgtggattgcacgattcgttgcgcattgaatttacccgtctggctctggagaagccgagaacttttgcggatgtgttgctcctcagagagcagacttcccaataccggcaagacacggagctgatgcagtcggcagcggaagcggagccgtttttcaaaccattggattccgtcccgacatataaaggcagtgccaatgctgtcgttgaaaaataccgaatgttcctttccaagaccttgaaatccggaataagcggcaagagtgaaatgcttgctttcataaaggaagaggacaggctgttccgttcgttccttgaccatttgactgaacttgccgatgccgacctttctgtcattacgtgcgacacggagaaatgctgcctgtcgatattccagtctgcggagaatggcaggctctcttaccgggatgccttggtatatacagccaggcgaaccaaccggagaatcatactcaacgctttggcttgccgtgatgacatcaaccaagacaatgtaaagaccgaagcgcaggcaagggcttacgtttggatgttgttgcagccgtatgttgccttggatggtttcagcgtggctatcctgtccgatatggaaaggacaacacttcatgcagtcgctgaccggacacctcagatgatagccaaactcaacaagactgccggaacggacaacgaccaatggcgggtattgcccggagtactgatcaagataatgctcacatccatttgacgaaccagaaacaaataaatacaacagttatgctacaacttttttacgatgactttctctcctttgtgccgctccagcttccgcagttgctggatgtaaccacaatggaacagccgcggttctatgacgattacgtcctcctttcgtttccgcttgccgacccatacgatctggaagaagtaatggacatcttcgaggacgacatggagctgataaccctttatcatcatattccttcaagcgcaacgacattcggcagcagcacctgtgcctattccaatccggctttcggacagatgttcaagatgaacgcgagagtttctgataccggcaaggttgaccgcattgacgtgaccatctatgaatccctggagttcatgtgttctgacatctgccttgacttgaaacttcacgaaaagaccggtcatttcaagtaccgcaagaccaaggaggagttgcttgccgaatttatatgagacggacgatatacctgcaaatgctatacattatcaatatgtacaggagttggatagtcgtggatgacggatatggatacaggcaaagtgtcgtgttcagacggggcaggccggtttcctgcgtgtgccgtatgctccggctccgttccacttataagcacaatggctatgagcgtggcacgaaatggagcatatccgaatacgagctggacaaggcattggcaaggtatcgtcaaaagaatcacgagttaaaggcacggcttaaaaaaggagcgtcatatcttgaagccaaggatgtggaagccattatagagattgccacctatgggctggtcaaactggaactgaccgaactgccattattcaaacaatactgattacacaaaggattacgattatgatttggattatcatcgaaatgtcatttccggcattgctcattatactgcccatgtcattgtacaggagcaaccggctttttatggcaaagttttaccttaggatggcgggtagtgagagtgcaaggaaactctatgtgcagtgtatgcttatcttcctcctgctatatcactatgtctatgccggcagacacttcggagagtggggagttctgatatccaccataccttgtgccgttctgttctcgttcagacgtgccgacaggtggatgcacagactccacgaggataaaaaaaggttcgttatggcagccttcatcacattggtcatctgcgctgtaccacatctgcacaccacggcgttcacactcgcctttcttcttttggctgccatgttctatccctcttgccgtgtgttagccgaatggaaggatgacgacacgcgcaagcatttgaaagaaaatccaaaaacaatgtccgaacattactgctgacatcatcacgcgaacctgccacgaataagtggatagtggcaggttaatagaatccacatatagtcaaataaaaatcaaatgaaatgatgaaagacaagaatagagccgccaatcaggtattggcagatatgatgtttttcgactacctcaaagagaaagtcggtgaacggaagacaaagaccggtgcctactacgacctgttggagaaagcaacggcaggttttatcgctccctttttgaagaaccacgagtatgtgttgcaggctgaccagtgtcatgtgaccatttcagaccttgcggtggaatggcactggcacagggctaccgtcagggcgttccttgacaaactggaggagatgggatatattcgtcggacaaggttcgcaaagagtgtggtcattaccgtgacttttgcgccattctccagtggcgaaactcctgcctcttataccggtcatacaggggccggacttgccgatgatttggacaaggctttgtccgaatggataaatggcagtctgtctgacgaagatatgggagagatttgtggacagtatcatgaagccggactgaaacggcttgccgatgaatccggcaaagatcattcgggcgacaagccggcaataaaggcaggtgcagaaacggagttagcccaagagattgtcgaacgtgtagccgtagccggactgaaacgcgccatacgaaattcgcgcttcgatgatccgaccgatttcttggagttttttcacggggaactgggaggtgactggacttcacttttggaggcatccaagataatcgccaagatgattctggacgctggaaacgacggcgcgcccaatagttcgagcgaaacggatatgcttgccacgctccgacagccgttcagggcgttgtgggcaaagtaccaggagcgtgattccacccttttatagactccacaaccgatgttgtaagtcaaaaactattgtataaccacggatgaaccgtgatgccctacatttgtaggcttgccattttaagcgtgcagcggtgcttgcacgttgaccaaacagagggaagtatgggtaactcaataccccacacgactacggtcggtgggagtggttgccggacaagcagcaagctggggcaaatcggttgtccgataaaaacggatgatatggctgaaaaatcatggcaggtgatgcacatgaacgtgatgaaaggcataaccaccgcgcaaagcaacgaacaccagcgtaactggacggaaagcggctggaaacacgccatagacaagggaacttatgaccgccaaagggaacggttgaatttcgagattgtaaagggcggtaaggtgcgacctataaacaaggacaagtctattcctgaacgcatggctgaaaaccttgccgggcgtgggataaaagatcccaattcggatttggcagaaccgaaatttcgcacggtcgtggattttatactgggcggatcgaagtttcaaatgcggcagcttgcttttggagaccaggctgttgtgtatggttccggtaacaataccgccaatgcttcgcttcaacgaaagccggaaatagaagaatgggcaaaggatatgtaccgattcatgagtgaaagattcggtgaggagaatattgtcgggtgttatgtacatcttgatgaaacgaccccgcatatgcaccttaccttattgccaatccaagacggtaagtttgcgttcaaaaagatgtttgcaggaaaggacaaatatgagttttctgcaagaatgaaaatgttacacgatgaactctcgcaagtgaacgaaaaatggcaactggaacggggacgtaatgtttccgaaactggggcaagacatcgaagcacggaggaataccgccgatacctttcggaagaatgtaccaatatagaggaacaggttgtccaacacaaaaaagcattggcagaccttaaagtggaaataagtctggcagagcgcagggtgaaaggcttgacctctatggtggataacctccgaaaagcgaaagcggaaaaggaatcccaactatcggcattggaacgcacccttcaatcccatcagggagatacggctaccattatagccgagagggaacggttggaaaaagaactggcttctatccaaacgaaattggaagacaagcaggataagctacggacggctgaccaacagcttgaagcccttaaaagggacatggatgccattggcgagcgcacggaggaactgaaaggcgaagcctataaatacagtcgtgaaatccattccaacgtggatgtactgctcaaagatgtgatgctggaaacattggttggagagcattcggcaagagtggctgaaatgggagctgcggagcaatccgtctttgacggttctttgttgcagagcctgaccgagcaaggggcggaagtgatgcactgcgccacgctcctcttccttggtatggtcaacgatgccactacatttgccgaaacgcatggcggtggaggaagtaaaagcaaccttaaatggggaaaggatgatgacgaggataaccgtgcgtgggcaaggcgttgcatgatgatggcaagcagaatgatgcgaccggcttccggcaagaagcaaaagaggtaatcggcagaatatgtttttctgcaatggataacaaaacaaaataatgcgttgaatatgacaaagaaaatatttttaattctggcagtggcaggtatgggctgttcactgcacatgaaagcggctgtaccacctgtgacaaaggacactgtacagctggagtcgtacacggatatcgaacagatgctccggcctttggatccgacttaccataagggtgtattcgtgacatcgccttggaacggcaactggtttgtcagtcttcaaggtggtgcaagtgcgttcattggcaaacctgttggttgtgccgacttatttgacaggataaagcctactattttcgcatcgcttggcaagtggttcactccgcagatcggagcaagaatcggttatggaggttggcagttcaaagattgcgaactggtcacaaatgactaccatcactttcatgctgacttgatgtggaatgtgcttggatatcggtatggcaaggttgagaatcctcgttggggaatcattccatacataggatttggactgatgcacaatccgcagaacggacataatccgtttgccatttcatacggaatacagggacaataccgtatctgtaaacggctgtctgcattgttggaaattggcaatgtttccacattccaggactttgatggctatggcaaatccaatcgtttcggagataatatgctctccgtgtcagccggcttgtcgtttacgattggaaagaccggctggaaacgtgccgttgatgcgagtccttacatccggcagaacgagtggctgattggttacgcttcacagctatcggagagtaatcgcagatacaccgggcaacatgacagggcgatgagaacgatcaacgaattgaagaagattctggaaattgagggcttgcttgataaatatagcaagatgtttgatgaccgggagagtttgggcaatgtctatccgagaaacgattacagcggactgaactcgctccgagcaagattgaaaaacaggcattgggatggtaagtctccattgtccaatgacagtttgttcagtaagtctgaatttgtcaatgccatacccaataatgacggtagcgttgtaaacggcttctatgtcacaggtgccgattccctgctgtctccagatatgaataatgacagcatttccatttatagccattcggattatctctcctttataggttccggcaacgagtgcatcggttcacctgtctatttcttctttgaactcggcacggctcaactgactgataaatcccagttggtcaatctggatgaactggcgcgtgtgacaaagaaatacggattatccgtgactgttgcaggtgcggctgacgctgccaccggaactgccgatataaacaataagttgagcgcatcgagagccgattatattgccacggagttgcgcaggcgcggagtgactgttgaaaatataacaaaggtctgtcaaggaggtatttccaattatgtacccactgaagctaacagacataccaaagtcatgctatatatgaaataggaaagtgtaagattctttttgttcaaattgattagttaaatgtcaattcttttgaaaggagagcctgtccgtgatggatcggctcttctgcattataaaaatctcgttataataacttttgtatttcgctccaatagaagaacgcttctgcattcgtcttctttaatttattcaatttggttgagagtggagagtgtatcgttacgttgaccaatagatttgcttcggatggattatagtgctttatctcatttatgccattactgataagtttggcaagataagctgcctttgaagcatttgtaatagcactttccaaagtatagacttcactatgaataaagccacgcacttttttaattccatcttgaatcaggtcaaattcctcctgattgtcctgcccgcgcattactatacatttggctgtatcataaatgtcatccaaaactttttgaattgcatcaggattctcacctctgtattgaagttcaaccatcgcaaacttattgaatgtttccgctgtaacagataagtcaccaactatgtcgaaaagcgatgcaacgtcaaataactgtttacagatttccattgaacaattcttttctcctttgaaaaatgggattccggtcgtgtgaggagcaaacgcggttaatttatcaccgagcagatcttctttacttggcaattttaccattacgggatctccttctgtctttaacaaacgacttttaatgggaagttccaccacatttgcataatgaatttcctcgaataatacatccaacagaatcttgtcctgacgtcctcctgccggatatgccacctggtaaaagaatttggcatgttgttttggtatatcggtacgagagatacgttccaccaatttaacctctccaaaaccatattcttcggaatacttttccagataatcttcaatccttgttcctggaggacaaattatatcaatgtcgattgaaagtcgtttgccggtatcaagatgaagcattaaggaagatcctcccttgaataaaaagggacaaccggaccgggctaatgcttccaacaacgagaatgcacggattgttttttcaacgagggctatatcttttatcttgttgtctttggctacttgttctatccaagataatgtcctgctatcgggatgtatcatatattgattgtattgataatttgttcgactttttgttttctgttacggcgtgccgcatatctcaacagccgtggcattttgatttcatagtccgagaaggcgtttgaatatatagtatataattcattaccctgaagatgttgtagttccttgtcggatatggcatcaacaagcattttctccaatgtaggaacgggacagccatcaataatatctattggagcctctttgacaagaggacgaacaataatcatatcacgatttgtaatatatcgatccgcatcttcttggttcggattcaaaaaaacagggattgcagattccatgttttgtaatgacatgaaaacggattccattgccaccctttcaacatctaccaatgtagttcttaccgcaggtatatgtaacatcatagaagcgaatatagatggttgccatatacaataatctatgaaagggaatttttcttttatatgtctgttgagtgaaagcataaattcgcttggctcatacaaaaaatcatatttcaaatcttcatttaatttgtatttcccgtatgaaactctgatgattttgttctctgcaagcatcctattcaaaagcacaacaagagaaccttctgatatgtttttcataccagagcgcaccgcattcagcaggtcttttcgtgtgaattgcccgtcctgttttctggcaatatctattatctgatttacggcagtcattattgttcttcaattatgttgcgaagttataacaaatttggcaaatatcaatgcgtcttgccgattttgttatgcttttaataagaaaaaagcatgaactatataacaacttcgtcaaatatcgaaagaatttgccggagttgttatgcttttcctgttttacaattcctactatctatctgccaattatagcagttttacttgtcacatataatgaacacctccggctcatcttgctggctctattttcctttgcaaaggtactgcggtgagggaatgccaagtaccgctatgcaggtcgttccgctaatggcttggtggacttgacgacaactttcctcaatttccaccaagtgttaattgggtatttcatcaactcctcagccatttacttgtcttatccttctgtttccacagtctcttggttgcacgtaaaattcagattccgacaagaaagccgataaaagcttcaaaataagggagaagaaaaaatcaaaataaaaaagattatggtaaatatggaaacaaattcagatgagagaaagataatagacagagttttacatcgtgatatggtattcaggtaccaattattaggtcgtttacaagctgattgcgaatactaccttaattacggcaatcggaatatcaaacgcttgtgggcaggcaatgtaaatctgcaaattaaactgatggctgaactttataatagtttcaaggaagacgaaaaacctcaatggcttacaatggatgaaattattgcatacggaaaagcaatggcagaggaagaataaaattgatgtattaacggactgagctggtatttggcttcagtccgttatcatcgtttccttctttgatggcaatgccttttatagtccgtttaagtataacctaaatggaacctaatatccttttttatccggaagataattgtcgttacctttttaatagtgtgcctttgacttttatatttattgagaattatgaactttccccggctcatcttgtcagctctattttcctctgcaaaggtactgcggcgagggaacgccaagtaccgttccaccgatcggctccactaatgccttatggatttgacgacagctttccgcaatttccggcaggcgtaaattgggtatttcatcaactcctcagccatttacttgtcttatccctctgtttccacagtctcttggttgcacgtaaaattcagatcccgacaagaaagccgataaagacttcaaaataagggaaaagaaaaagacaaaagttcaacgattaaaacagactgattatgcacagcaagatttttcaaatcacggaaacaagagttgacagggacaactacttgaacgaggacacccttgaacaaggggacggacactattacgactattgttcggagatagacgaggaagaacgcaaattccatattgccaatctgatagaaaaggcattgccaaaagggatgttcactcttgtggcagaaaacacaatccgatacaatggcggtgcggacaagtggaaaaaggaatttgttacagccatccaagaaaaggcacaagccgttaccgttgaaaactgcatgatgtggattggagcggtgtaccagcttgaaaaatttctcaaaaatccacttgacctcggttatcagttctatatggacgagtatggcgttaatggctatgccgaacaatcgtactcgtttttacagacggtcagccagtttgagccgggaaaactactttacatcggtggagttattgactatcatttctaaacactatgaggacaagacgaatgacaaaggaacaaggacagcggtgcaatatcagccgatttcccaatttccaccacacaggcagtatcaaaggaatgaaacggatgtactacggaaaccaagcacttttggtaaggtgcggagcgtacatatacaatgtttcaagtgaaccaagtatctattatcaagcaaaataacagacattatgaaaggaacagaacatttcaagcaggcaattaaggcatatctggacgaaagagccaagaccgatgaactctttgcagtgtcgtatgccaaagagaacaagaatttggacgattgcgtgacattcatactcaaccaggcaatggcaatctgtaaagagggcggttgcggtatgaccgatgacgaggtttattcgcttggagtacattactatgatgaagatgatatagaagtgggtaaggcggtcaactgcggagtgatagtcaaccatagagtagaactatctcccgaagaacaagccgaagcgagggagaatgcactcaaagcctaccaaaacgaggaactgcgtaaaatccaacagcgaaacagcaaaccgaaaccgaccccgaaagcggtcagacaagaacccgaacaaccaacattatttgatttaggactatgagagcgaaaacgagattacagcataaggtagtaaccgccaacggacggttactgccacagacaaagaagcaggagttatgggcatttcgtcaatgtatcagccattacgcataccgcacaaaaaacggaggaacgacctgtatggattgcggttatcaatggaacgagagtaacaaaaaggtgtgccgttgcccacattgcggtgcaagactggagatactggacaccaagtgcaggacattcaaggacaaagcgtattattccacgcttgccacacaggacggtttacaggtacagcgtgtatttcttatgaacgcaaacttccgtaaaggcaagaaagcggagtattattctatggagattgcacgctattgggtggacgataacggcaagacggagataacggcattgaaacgcacactcggacattatgcggacacttttgttttggacggctgtctggagttacggagagacaactatgtgtatagacggattgccgattgcaaggtctatccatattattctgccactccaaagttaagacgcaacggattgcaaggctcattggctgacatcgaaccgacacggcttatcgaagccttgttgacagacagcagagccgaaacgatgttcaaggcaggcaggaaaaccgatttgaactacttcctgcaacattcaatgtactttgatttgtattggaacacttacaagatagttttacgcaatggctatcatatagcagatatttctctttggacagattacatccgcttacttgaaaggtgtggcaaggatattcacaatgcccactatgtctgtccattagacttgaaagctgaacacgaccgctatcaggaacgggcaaggattattcaagaacgggaggagcgtgagaaacaaaggaaaaaggcaaaggagaacgaggagcgttttaaagaattgaaaagcaaattcttcggactgtcattcacggacggactgattgtagtcagcgtgttggaaagcgtggatgattattacaaggaggggaacgccctgcatcattgtgtcggacaatgcgaatattatctcaaaccgcagtcgttggtattttcagtccgaattgaaaaccagcgtattgaaaccattgaattgagccttgaaacattcaaggtattgcagtcaagagggctttgcaataaggctacggaataccacgaccgaattattcggcttgttcagaagaacgcccggcaaatccgtaagcgaatgaccgcataatctgttctgttcttttcgtcagccacttgttacgacacacattgtagcaggtggctttatgcgtggctacggtaacttgctgtttaccgtagtgatttctgttatacaagacttaaatgctaactgttgtgcatcagcttgaagaacgaactccgaactagaaaatctaactttaacaagataggattaggttatgacggatgaaatttttcggggacaacttccagcatttccaaaaaacagtttttccattgacttggcgacaaacatacaatttgtgcattaaggtttattccgaacttttccgaaattgacctgacctgactttttctgaaaattgactttagggctgttctaacagataaatcaggtttctgtaaaagacaggaaataaacgctaaatatttgactttaagttcaaaatcaatagacgactgttttcttttaatttttaacagagctgacttgacagttggcggtggcaaaaaacttccgggacttatctcgtacaggaactccaaatcataaaaagtatgataaaacaccgtatatggattataaaccttacttgaaaccaacttttttgcaggctctgactgaaggacaatggaacctcccaaaaaaagttcgacattatcaaacatcaaaatcctgaaaatatcggaagtaatgccataaggaatatttgacactaccttaaaaggtaacagcggaactgtaaattttctaaaatcacacccaacaacctgaacgttttgggcattattaaacctcttacacaaatgcttgtataagaccaagtcgttttcaatggcaacaactttgttcacatttttcagcaggtggacagtaataaaacctttgcccgcaccaatatccaaaactgtatcttgttgagttatatttgcttgttttattgcatcttttattagcactttgtcaatagtaaagtgctgacccgtgaaacgaacgggcaatttcttttttttttgtcattaattaacgtcagttcggtgaaattaagttgttgattattagtaaaatagcaatatattttgtaaatttgaaatcactacaaatcaacttcacaaaatacattgctatgatctcaagagacaaaattactgaaattttctgtatggccgatgacttttgcaaactttatgaccgattcatcaaggcaaacggtcttgcacctaagcgagacaagtccaaacgcaagtatcatcgcgactcgagaatgtcctctgcggagatcataaccataatgattttgttccacctgagcggatataaatgtttcaagcatttctatatcaatgaagttaaagaacatatgactgacatgtttccaaagacagtggcatacaatcgatttactgaacttgaaaggacagttgtaatcccgttcattctctttgtgaagagatgctgtatggggaaatgcaccgggatcagctttgtcgacagcacattgcttcgcgtatgcaggaaccaacgtattcatatgcacaaggtctttaaaggtatagctcaacgggggctgtgttcgatgggatggttctatggcttcaaacttcatctgatatgcaatgagatgggggaactgttaagctttaaagaacaagactttcgttgaacagttgtttggaaagttggccggcgacaaagggtacatatccaaggacatcttctcaaagttgtttgtcgatggtattcagcttattacaaaactgagaaataatatgaagggacagataatgacgcttagtgacaagatacttctccgtaaaagggccatcatcgagaccatcaatgacgaacttaagaacatagcccagattgaacattcgcgtcaccgatccgttaccggattcactgtcaaccttatggccgggcttgcggcatactcattcttcccaaagaagccgatgattgcagtagagagggttgaatcagaagaaaacggacttattcagctgtcactcttttagttataattcatcgaactcacgttaattacttcttacaggtgaatacttgaattcaaatcgtggagaagtgaataggcagtattacccgacagagcaactacgacaaagcaatgctatcaaaaaaaagacagcacacacaaagcatagactgattgtcttgacctaaaagattgattggaatttattcaggactgcctatcacttagatagaagtccaaggtctgctgaaatacataattcaaaaattgaaattgcttgactgcaaagatattaactttatctgataaattagtaaaaaaagaaagccgaatgcacaacaaggtgtataagcaatagcggggaaagtgccaaactcaaagtttcttccttttagctatctttgtgcctaaccgaacagtaagtgcataaaatccgctactgctcatacacttgaccgttataatgtactgcatatatatccttttgtataatgtcggcaacaaataaaaactattgccgaatttatatcctaaaacctttataggataatctcccattatagtcatcggaggattctccttagagccggccatcacgccacacggcattgttttatcgtgcaaaggtactatggaggtagaatgccaagtaccgcctgcgctaacaattcagtggacttaacgacagctttccacgaatgtgccattagtggtatttcattaactccctgtttatttacttgtcttatctcccttaccccatagtctttaacgcacataaaacatatcccggtggcgaagtttaacagcttcaagcaaagggaaaagaaaaaatgttcaacatcaaaattcattagaaatggagtacaacaatcaattatcggagaatgacaaacgatttgcggacgagttctcaaactatgtgaacggcaaaatggcttcaccccgaaaggtgggcaaggcattggcagacgaccaccgctatttggtaaacgagaaagccaaactgatgttctactttatggagcagttggcggagaactggcacaagggaagatatgaccagcgtaacgaatgggcgtgccgtctggcagcggaagccatagaccatttggcagagaacgacctctatcatttgcccgaagagtattacgaaaaccataaacaataatgaatatgcaagcacttcaaatcgccatcccaagatggaacataacagagttgaacggttatgagccgataaccaccttttggcaggatttctccattgccgacaagttcgggaacaatgccatagccgacacatacaggcgagccaagtccgaatggaaagacaactacaagtattggacggaactttgccttgtcctcaatcacaagatatggcagtggcacgagcgagacaatcaaagagccattctctatgacaaactgtggagggaagcggatgcaatgaccgctgaatggtcggacgaggaacaggaatattattttgagataacggattaaatcaaccagtggggagattggagaggtctccccacaaaaacaaagagtatgactacccaagaacagatacggaaagtaacggacattgcccaagaaaaaggctggagcataagcgttgaagacgaaaacaagacaagcatacaatttgagtttcaacgctataccaaatacgggcaggacttcaatttcaatgccgatatgcaggatgaagacatcgacacgcttattgccggtatgaagcgatattacgaggactttgacccggattatgaagcctatttatggattggcgatgacgggcacggcaagaatggcgcaccttatcacattaaggatattgtagcggatatggaagaagtcgaagaaaagatatacgagttgctacaagcacttgaagttgaatttatctaatggctacaactatgactttatcggacaaatcatattacagaagactttgcaggaacatccttgcagaccgctttaactggcgaaaatactgcacaccgagcctttattttggcagggaaatttgtgtaacaccgcttcattgttcctacggacaaatcggctacaccatcaatttcccctataccaatgcaccggaagtggagtatgattgggaaatgaacaaacttacgattgatgatgaaaattggaaattggtatgttagacgaaatcagacaaaacggcaaaacagtgttgtcaggagaggatgggttttcaatacctatgtttttcaacaacttgtgcggcaaaaaaatttcaggcgagaagtaccgggattatatcagatacatagccttcggagaaatgggtttcaagcccggagaaatcatgctttaccgcaatggtacactggtaaggactggtaaaataaatattgaaaaatagatacggatatgggaacgacaactattcatcctgcggagagctatcttcgcaacgaaaccaatccttcgtctctatatgtgaggattgcaggaaaacgcagacgcttgttcattaatcgggacaggggtgttattggcattatcgcgcccggcaaaaggacaaaagattatgcattcacagattggtcaagcatcgagcagatatactatccctcgcaagaacaggaggcgaatacggacaggaaactcattctgaaatatcagaaacttgcccggcttgccacacatacaaacgcctggcttcgtgacatcgcaaatgcggatttggataaatccctttacgagaaccatatcacgacaggaacacgcattgacggcaaatgtatcgggcttgccactatcgaaaaatattgtggaacggcatctatgcagcgtttcagagaggcaatgaagaacaaagagagtttttccacttgtcgctttgatttttgcggttatgacggaacgctttggtgtgagccacgggacaatggcgatatgtcggcaggcttcagcaaagaataccggaattgtggcaacggctattactatctgcttatcaacgatgaatacgtgataggctatgatattgactgactatatagctacaacaatccaaccgcaaagaaagagactaatttgatttggaaaagcgggtaatatagtcaccccacacctccaatttgacaatcagcggatgcggcatagtgatagtcttgccatagaaaatggcagctaccaccttgccaccgcaccgttctatctcctccttgtagtcggtcatactttgcccggtagtcagtacatcgtcaacaataataacatctttcccttttatatctcctgtgattcggtaattccgttcaagtattcgattctcataacctttggcttcatgcaaactttcacgtggctcgaacacatcaacatcatatagtcctgatgtcagattcggacaatgggtacagacataccagttcaaacgcttgaatcgctggatatatttgaactcatcgctacaaggcatgaacatgatatgaaaatggtggtcatccatttgtaaggcgttcatgcaagatttgaaaaactcaatgccgtgtatttttccctccttaaactcatagatggaatggcagaacgcctgctgatcatcgttgagaaacggtttgtaccgggatggataatattgcccatagaatactactcttgtaccgtgcaatttgaatggtttgagtggtggctgttctttgaataaatccggatgtaaacaatagaacatacgacaagcatcccgatgaccggctcttaccgccaaacggcataaacggtcacgttcatcctccttctcggtcttttgcgcagctaaaaacgccgtttctccggctttccgccgccaatatccaacgatataccataggacactgataacaccgagcaggattacaaataccagcctttcgtgcatcttgaccgtgaattatgcgcggaatagccttcgtgctgtttgcaaaaaatcatacttccaacagttcactcgtctttgcccaataatagaaggcttccggtagattgcttttcaacttgttcagtttgttggtcagcgaaggtcgaataaccaaatccttgatgtcaaccggattgtttgaatagcgttccacttctgtgactcccttttcaatcagcgtggctaaataagccgcccgtgccgcatcaataatagcattgtctatcagataccgttgtttgtacataaatgactttacacggatgattccgtcttgtatcaagttgaaatcaccttctccgaatttaccccgtgtggagatacagagtgccgtttgacggatgtcattgaagacctgtccgatatccgttcccaaagaccggtacgagagttcgactaccgcaatcttgcggaaagcctctgcggtaatctgcaatcctgaaacattttcaaacaaccgccccacgtcataaagttgcttggctatctccatcgaacaagatctgccgttcttgtaataaggtattccggtagtgttgggagcgaaagctgtcagtttatcccctaaaatatcttctgcggacggaacagtcaccattaatggttctccctccagccgtatgaacgggcaatcaatggctatttgccgggtttggaaataatgaatgtcctcgtacagtacatccagcaggatataggattgggcgtccgtgtcgttccggtaagctatctgatagaaaaacttggaatggcttttaggtatgtccgcatcgtccctttgcttgcgctctacgagttccagattgataaagccaaaatcggcaaacgatttcagatagtcctctatattggttccgggaggacagatgacatcaatgtcgattgacagacgatgggcagatttcccaaggatgagcataagtgctgtgccacccttgaagacgagaggacacccggctttaaccaacatttcaagcagggataaggcacggattactttctctatgaggttcttgtcattgtagtgcagttcggatgcaacctgttcaatccattctgtcgtaaaacactctttctttatcattgtatgtttaagttttctaaaatcgacgataattctttcttcactttacgcctgtcggcatacctgaaaagcctgttcctgttgattgtgtacaggttaaaggcgttttctatgatacggtcactctcactgccttgcaggtagaaaaagtccgtatctctcaatatatccactaacagtttttccaacgtgggcataggcacgccggatacttcttgcaagggagcttccgaaacaaggtttttcacgaaaatgacacggctgtccatatccacatatcggtatatcatatttttgtccggtcgtaggtaaacattgtggttcttgtctttcagaaaattgaaaacggtttctgccgagtccctgtccgtttccacgtagatgatgcggttggatgaaaggtgatgttgcaaaggggctatgatgtccccttgataaacacagaatttcgcaaacggaaaatccgattgcaacaaaccgtaaacctccttcacttcctctatcggttggggtgaaaagacctgtttcatcactttggcatacgttccccgcccagttctgaccagtacattttcattcacgagcttgaacagataccaggacaaagaagactttttgatgcctgtcttctcttgtagataagcaaacaaatctcctaaactaaagtcatgatgaacttcagcatagtcaagtatgaatgttgtcgtctcgttgctcatgtgattattattcctttcttcgactgcaaaggtaacaaattttcggcactaattcagaatagtgccgatattttgcgactaattaaggtgaaaaatctctcttttttgtgtaagtaggacttatcagtgggactaaaccaattcagccgcagagagggcgactctctacggctgaacagaacagatagcagactttatactcagcggtgcatcccgccactgtattccacctcctctttttgatattgctccatttcattcagcttttcattgacggattggagattggaatcgagcgaattgtcgtggtcgtatggaaaactgtgactgacggcaatcccggcattggtcgccgtgccgacatcaagggtgtcggcatccctgttatacccgatatggagaatatctccgtttggcatttcaaggacaggagtacgctgccttgtcatcgcagagaactgctcggccgccatgtctttggcaacctcttttatgtcactgcttgccagccggacaccataccgtgtgatatggtcacggatttcctgctcagagtatttcagcatcacctcgtaagttcctcccacgctgttgttatagatcacggcaaaatccttgtcttctatcagcagatcatcacccttgttctggcgaggagagacaaaggtatattgctcgttgattccattgccgtcataatactccttggcaagccggagtaatccctcataatcgcctttctcccgaagcgcatccagtcgtgaggtgtcatcggtggattgcagataggctacggaagagtagaacacctttccttcgggtacggactgtttgatctcattccgctgtccgttatcatgctgcaccttgcttttctgttccagttcctgcactattttatccacattctgcgtaacgagcgaggtagccctttttacatccagaagtgtggtcttgataaactggggcgattccttcaagtggtccagccaggatttcagataagcgcagctctcttctttcaatgccttgctcatgccgtaacgctgtgccaccaatgcgctgcctaattctgccaccagttcctcacgtgcgtattcgtccgaaccgaaaccggacggtttgatacggtcgagttgcccctcgatgcccgtactgtgggtcatctcatgccaaagagtaccataataggattcgccgtccttgaactgggatttttcgggaaccacaatctcgttcttggaaatggaaaagtatgccttgtcctggtgcatcggctttatcgggcaaatccagcggttatcacggatcatcacatccatcggttcaaaagacatcttctcgctttcatccaactttacggcatccccattcgccaacttgctccaaagttccggacgggcttcctgaagattggtttgggctacattgaatacccggaagacctgcatcttcggatatacattgtacatcttcttctcttcatcggagagtttcttaaaatcgtcatacttgatcttctccttggtctccttgtggatgcaggtaaaggtagtgagcatcacggggaaggatttttcgcccttgttcactgacaccctcggcagttccacgccctcctttgcctgcttttcggacggtttgttcatccgttgcacgcagtcaaaggtgcagaaacgcggtatcttgtagccctcgttctcgcaatgaagaagcaacatcagcgcgttcatcccattatactcacgtccggacagattcttcggccaccccaggctaccctcggtaatccacggtttcgtccagtccttgctgatggtctcgatacgctcgatcatcatttccgcaaagaggtcaagagccttgtcctccgcggacgggccgtcattgctgtttttcctgtaaccggccatggctgtcagttgttagggttatacggctgtttcacatattccgacatttccgataccttgcaggtaatgttcagcttgtcgttatagacggacagttccagttcacctttggcctcgatgccggtctgcggttgcagccactcctcacgtttacggtcaaagcctaagaagcgtacccacaggtactcgaagccgtcattgaccttttccgcagaaaatgcggagaactgcaagaaattcttgcctttcttgtctgtcttctcttcgatgttcttgcctgtctttccacggaagagcatttcgcccttgatggaatcctcgtttgaagccacggtaaggttaaccgatgaagccgacagattgaaatagaggttgtctccacgcttcttgaaagtcaacacaccggaaatttccactctcttgcctacggtatagtcagcccgattgtactcctctccatccttggcgacagagatttccactgttttgtcgataccgtttcttgctggaatcacgcaatttacggcaaatgccgtgaaagccttgttctcattgttggtgcgcactacagccgccttgctgatggttccgcacactgttacgttacacttaatcatattgcttgtagttttattttaaccaagaccatttgaccggaatatcctattaaatgtgaactacccgcatatacgttccgtctttaatcgggcgcacggattttaatccagactatccctgacgcaatgacaacctgcacacccacaatcacgagtgtcaccaccagaccgaacagccggtagcatacaagggtatgcagtcctgcaagggacagtccgacaaacaacaatcctatttccatcatcacgcttttcattatcttctgatttgctcgttctggccctgttgctctgacattccctgctcgaagttctgggatgcctgttgtgacaacacaatggcattgaccattcctgccactcgcatacgcttgctttcctccgtaagtcccggattgttcaaggtggcggacagccggctcaattcaacggtactgagttcccgtgagacttgcacgataccgttgtctgcctgcaatacggctttgttgttctctccgatgacaagggcacaacttttcatgtggggcaacaatgaagtcagttccaccttccggctacctgccatttcagaaatggcttctttctgttcctcttcgttcttgttgtcaatgactaccgccagcatcatcagcgaggaaaaggctttgaccaccatatccataatcgggtcattcgttcctgaaagtccgacaccgctgtcttccgaggataacagtttcttcatccactcttcaggactttgtgattttgtttcctggggagtggcagtaacctccgttttgtatttagccaacaggtcgttgccattatgcaaggcttgcaacttgatgtttcccttttgggcaatgtctgccagatagattgcgggatcaatgtctcgtttttgtccgtcagcggtaatctgtgccactccgaaatgcaggtgttcgccggtagtccgtgtcccggtattccctgaaacaccgagtctctgtccggcttgcaccatatcacccaccttgacatcaacagaggacaggtgcatataagtgttctgtatcttgcttccgtcagccctctcgtattcaatggttacggacttgcctccggcggttttggcattttggtttactgccaccactttgccgttattctcggtagccaacaccgcatcgcccttacagcggatgtctatacccttgtgcatttgcagcttgtcagcattcatggggtcggtacgcattccgaacggtgaagtgacaaacaggaactcttcgcgctcgaccgggaatgaataggtgtttgtcgtaaccgcttgcccggtttctgtttccaatccttttgccttcatttctgccatgaccatccggtcatactgctgtagcccgtttgcttcaatgattttttgcagactttgggcataattgccgccacttgcatacccggccttggcaagtcctttcgtccaacccttgtaatcgtcaggagacaggtcaaaacattccgcgtaccgtttgttctctacaaggaatttggaatgatgctcgtaagaatcgcccacgctgtcgtagctgcaaaacttctcgttgggcttgtcatcggtgtaaatgccgtatttgccaccttgcgcaatccaccccggagtggctttgataccaaaatggttgttctcgttcagggccatatggctttgcccgttgctgctctccagtatgccctgtgccaaggtcactgaagccgggatgccgtatttgcgcatctgttccatcgcaaactcggcgtatttctccacatattctttattcttgctcattgctttgtctgtttatcggtgcattccttttgatacctcttcctcttcttcaacttcctctttaggctggtcgtgcttgatttcctcgtcacggctgattttcgtttccacttccgactcctgtttttcggaagaggtctgttcctgtgcctggctcttgttcagcacgtccgcgaaaagcgttgccgccagatgttgtttgaaactgttcctgtcctcggcgacccacatccgttgccattgctgtggtgtgacgcttcggggctgcggtttctggttgtcaatggtgggagcgcagagtatcgccccgttctttgtcttgaacacggccactcgttgtatgcggttcaagtcaatgctttcatctgccgtgtggaacaggtccacttttagatccggcttgctctcggcaagggcatagtattttctggccaattctccacgcaccttgtctatattatccaatgactgtttcagcgtgatgaagaaacggttcaggtcatccttttcgggatagacgctgtaaccggcttttccttccggcttgatgaataaagcccagcggtttttgtcatcctgtaccatctgtatcttctcaaaccagggtttgtcagcatgcttcaccgcagggtgcgcatcgatggtggagagtgtttccaatgcccagtttttcagacgcgccacctctatctgcttttcggcgaagtaacggtcatcgggacggtagcccaacgcaccgtccggattatagaaacgcactttttcaatgccgcttttctccaatgcgctttgtatgcgctgtttgctcattcccttgatttcgttgttcacctccaaggatgcaccggcagggagtatcacatcggcactcttgccttgtttgtcgatgaccaggacaatggtcttgttttccttgtcgggatgcttcttgatttcgtcagccacgaagaaatgcttgggcatttgctcccgcatctgttctgtctggcggtagttacgataggtggcatactcgattttttcgccccgttccgctttgcgtatcacttccagcgcattgttcacatcgctctcgatggcatctatcagacaagggttctctttcagttcacggttccaataatccaccagtttgacactctcgtccgacaaccgggccggaagtcccatttccagcatcttgatacccgaagcgatttcggcaatcagccgttcctgcttgacggcatcctctgttgggggaatcccgtttttcatcaccattccctcacgggcaaggcgttgctggtgtccggtggctgctatgatttgccgaagggtctcctgcgcgtaatcgatgtaatgtgcgaaatccttttgccgtggaatatatatcgcgtctttctggctgtcataatgcgccacaccgctgccatccgtgcgaaccggtgccagatttctcgaaatagactgtacgaaggcattgaatttcggcctgagctcacgcaattccttttccccgaatccttgctcgacactgttgccgtattttgccaatgcgtcatcgtatgctttcctgtcaacgtggggcagcaaagtctggtcgatattgaacaatgtgcgtatctccctgttgtgtacgcctttgtatcggttcttctcttcgggagaaagtttttggtagtcatcccttgatatgacctcgttgggattgttcctgttcacgtacttgttccaattatagaacaggaacggtactcctttttcgtgttccttgacggattcgcctcttgcctttgcttcgctatataaggtgaagaggttgctcttacatccgttcttgtccgagtgcagagccatgaacagggcgttgaacggactgaccgccacgcctgccggataaaacttgggatagccctttcctgtggcattgagccagtggccgcccgcactgaccgccccgtttaacgctccggagagcagttccacttgtttgtcggcggcatttttctcaaactgtgatttctctttcatatctgttgctgttttattgtattcctctggtacgcacaatcgtttccctgtcgttctcttcgtaattctgcgacatcagttgctgggtatggtcgctcttgacaaggatggcattggcaagggtattaagcggcaatgccccggcattgtaagctgacaccactttttcaggcaactggatggtgcagggtacatggtctatggttgcgataaggttgttcccttgcagtatcggaccggaaatccgtggattcagcggttcgtctgcatagacccggtatcggacggaacggtttcccgtattcaaaccgttatcttcattccgtttccatcctaatgcctcgtgtcctgccttgttcaacaaattggcaccgcccagtccgatcatcatcattttgagaataggattcttaatgaatatgccggcgacgatgctggcgataggcagtacattgtctcccaaatccaatgattttgtcctgcccgtaaacatacccaccagaatatccggcaacatggcaagcacataacccaaatttttgcttatgtctcccatgccactcaatcccaaggttgagaaaaaatcgccccagccgttttcgttggcattggcggtttgctgtcctgcctgtcggttctgtcctgattcaatggctgtttcttcccttgattcttccgtcgtttccgtttcattggcttgttggacggattgtgcggtatgggtgtttcccgattgtcccggattgcttgcaagcgcggattgacctttaacctcttctttcttctccatatcctgcaaataagtttccatgtattccggagcgatgaccatcggaatatccttgtatcgctcatcttttatcttttggccggcaataaaatcaaacggcattttcgcttgggcgttatggctcatccagtccctgaaatcaaaactctgtacgggaatcttcttggtcagccgttcattggtggcgatgatataaggattgtcattggctcgaatttccttggcttctttacggaatctgtcaaagacattcctctcacttccgaatacgcccttgctgatgcaatcttcaacggatgctgtgtttcctgttttgtccttggaggaagtcagtgctgaaaatgccaggtcagccccgacaaatttggcgaagctcgcccagcttcccgcaccgccgagtgatatggcatcgatgcttgcaccgatgactttgcctgtccctttttccagtttggacggtttgtaggctgcttccccacatcgctcgatttctgcggcaagcggtgactggttcaatgtgtatgacagcccgaaaagtgtgttctgtgccgccttgcgcatgatgtattcagcggaagacttgggcatattgtctttgaccatcttgcccatcatcaactctccgatacggtattccgtatatgcgtaagcgaggtcgcaccctaattgcccggacagttcatcatatctttccctgccgatttcatccaccacggttgtgcgccactcgtttgccaacaatgcgaggtctgcctgtatctccttattgtttgcaatcttctccctgcacatttccagatagtcctccgtggtcttggagttccattccccggtcactctcagtgtctggtacggatccatcatcggattaccggctgccgccatagaaccgaggataccggctgtactggtggaatatgcagccatttcttccgtttgtttgcggttgagatagttctgcgtgtctcgcatgacaggggcaaggtgactattgaagtagtcaccgaatatcctttctatctccgcaaagcgtgctgtatgcttgatttcgcccatgttctaataattcaattggttcaacagttgttccttggtttgttctatggcgttgtggtatatctccatctgcttggggaagaactcttccagccattcatccttttctatccggtcctgaatgaaacggatggcggccatccggtcgatttctacggaatgttcgccttcctcccggttattgaaccatgctttcgtccaccatcggactccggcacggtcgggatagacggacaccattctcggaatatcgaagctctgtacgtctatctccagttccgacaacgggtcgataatgccactgctggctactgcctcggattgaagtttttttttacttcctcgctcatggtagagagatagacattgtgcctgagagcgagataattgagaaagtccgctatcaggagattctgtaccttgccggccaaaggcaaggcacggctgcctatgcccaaagggtttgccatgctcggcatcgactcaaagaagtagttcttggccgctcccacggtgaacacattacgcagggactgttctgtatattcgggtacgatgtactcgccacggaacaggtcttccatatagacgggaaggaagcggagcatcagttcctcgatttcctccttgtcacggtcgtacctggttttaatctcaccgtcaaacggagtgaactcgtgtgccgcactgtgtcccgatttgccgagtgcctggatattaccgtaaagcatggtcaggaactctatcggattcagttcctcgccgtcaaacgccacttccatgtgaagatcatttccactgatggctaccgtctgacctgcttttaccttttgtccgaaacggatgaatatattagcaagatgcgcataggtcacttcgtatttgccatagcgtatgacaatatatacaccatgctctttgtccgtaccgatacttgacacgacaccgcttgccactgccgccaaagggcggtgactggcatggaagtttatgccgtgatgaaaggatgtctctctggtgacggcatctttctgttccccgtagccttttgacaaggttacttctttattcttttcttcctcaaagggcatacaatagccgcttggggactgtagaatcatttcttccgtgtatttcatttgtagaatattattgtgttatgactgtcttatcttctcattcctccgctatgggtctgttcctcctgttcctgctgtggacgggcttgacgctgattgccggtaacggacgcttcttgctggcgttgggtgttgttgccaatcatcatcatggtcaagaagataccggctatcttgccgagccagcctgtacgtccgaacacgaggaatgccccagcaatcaatccgactatgcttaatcccgatactttgccatgcgcgaggttgctgaaaaagttgcctaacatattcccggcattcccgttggaaacaccacttaaaaaattggacgctccatcgagcgtggaagagagcgaacttgacgcttggctcacgctgtcaaaagtctgttcggctttgccggtaagtttgtttaccgtttcggtagccgctttcgccgtgccgctgatggcgttggtggtgtcttctcctatgacggcatcgctcacgatgcgcaccacgctcttgtcggtggtcagtttctcccagccgacatatccggccgcggctcctacggttgccgtcttcaatgcgcttcctgcccctcgcaaggtctgtgatgggtgcaatacggctccaccaacggctttgcctgtcgctcctgcggctttaccgcctgtctttaataatgaactccagaatcccatatctttttgtttttatattcccgttatgttaaaaagcaccggcctttccgcttcgtttccaccgtttcatggcagacctggctatctctgctttgttggctttgggttgttcccgttccgtgatttctgcccacacgtcacccatcgaggtgtatttcaccgccatggtcagccgtcgcagctttttgttcatcagttgcagcttgggacggattccgaacacgatttccatccgctgtttctccgtcatcttgttgtctgacaggcagaccgtgcgtatgtcattgacaatttccatggagttgtatatcagttcccggtatatcttgttccggttcgtggagagtgctactgccacggcattggcaggacttttcctgagttgcccggtgaactctcccatgttttccgtgagatgggttatctcgtgatagaagccgtatatctgtgcggcgtaactgatgaccgaacggaatgaatccagataatcattgaactcccgttgcaggtcggtgacggcttccacctcctctttcgtccagatgtgtccggtggtttgcaggagcatgattttctcttggttcttcaaggtcttcttggacttttcggtatagatgagaaccattccggcaagggtggggtctatctgcgcgtggactttcacgcctatgcacagcagtgtgattatgataaagattgcccgtctcattttctctttcctccatctttttatcttaccgttgccgccctgcgccacctgttcattgccattcgtgccacttcaccattgttcctgtccagcattcctgccgtcacgttgttccacacgtcagtcatcgtgtaagtcctgatgctcaggtaaagcaggttgagtttcttttggaatgcggacagttggtcgttcaatgcccatagggtctggctccgttccgctcccgtaagcatattctccttgcctccctttgccacggcatcacggagcagggagaataccgttaccagttcggttgcggtctcgatatacaggttgttcatgctcattgcggcgacaataccctgtggattgtcgctgatggctttcttcaacttgcatagcgagataaaaatcctcacaccgtcattgtacaggtgggtacaggctttcagcgaggatgcgaaaccgcttgccgttttaaggtagctgttgtatttcttctcccactggcgcatctgctcgaactctgcggcaatggtattctgcaaaagggcggttttcttctgcccgtccatctggtcttttactttgccgagaatcaattcgttgccttctgccaatgccacatattccaacggattggtcgtgacaatctgcgccttcgccgtgacagacaagatgatgccgaataggagcatcgttattttagtgattggtgatctcatagattccttttcgtcgtttgttaaactctacacgctctctgataatatccacgatattgattcgtttgggcagacctgtcaattccagcttgggcgtggtcctgtccattgacaacaccgtgacagtctttagcccgaaaatctgctgcaataagctctgctgttcgtggaagtccaccacacggtacaattcgatgtaaccgatactgcgttggaacacgccatgctcggcagtcagctgttcgctaccgatgtgatagcgtatgcgtttcaggtatataagccggtaaatcaaaatgagggaaaggagaacggcaaggagggtggcgatagatgcaagaggggcgttctccattcctccatagaccagtcccacgggacaaagcaacagcaagggcagttcgtcgatgaagaactgtgccgtttgcggtcgtagtgaaatctctctgtatatcggttgttgcatggctcttatctgtgtatatttggttgtcggtgttcttcttccttgtcagttgcacaccccgttgtaccgagtgctgcccccaatgggataatcgcgtccttgatgctgtcaaggtattcctcgcttgtcttgccaagcagggcatcgttccagtccttgtaacagggcatcaagggaaagacttttatacggtcggaattgatgtgcatggattccgctatggcttggaacttcttcacgaactcacgcccggcactgtcgttgtcgaaacacaagtagtggtttatatccggagtgacggaaagcataccgcgaatctgcatatcggtgggagtgccacccgtggagacgaacacgcttttcttggaaaggtcagggttgtcccgaaaaccattcctgtgtatctggtagaaagccattgcatcgtaggcactttcaaaccacgcaacgccgcctgccttttgcaaaggctcaccgctgaaattggctatccacaagccctcgctgctgttgctgccctcggctttgcctttgtaacttccgctaccgtccatcttgggacggccgcgttcctccagtcctgcaatcttgtccggctctttgggaagtaccagcggaaaggcaaggttggcatacgccaaaccgtctgaacggtgtctggtagccagaaagaaatggtcggcaaaagcccgttgtgtgaagatgtcgatgccacggttcttgaagtagggataaaaacgcttgtgagtctccctgtcgtttacgtcaaaacggtggatgtcgtaatcatccagcctgaacggagtgttctcctgtctgggttggatgatacgcaaaggtctgtcattgatgggctggttcaacagcctgttgcagacaaggttgaccaacctgtctggagagacgccgttccggtgttccgcaaacttctcagggaatgccttgataaaggatatgatattatagagcttttgctgtggtggctggaaacagcatttgccgttcggtgtgacgatgaacttgtcaccccggatgcgtgtgccgttgctgtccgtgcggatataggacggataacgcaagccgtcacgcttgttcaggtgatagcctgcgtccatcagtatatcctgaatgtctagccgttgcaggaagtcatcgtatgtcagttctccgtttgccatttccgtgttccttttattccttaaaatcctctgcgcatctctgccacctccttgttcatctgcgcttcaaagttccttgctgccacatccatcggcgagtccactcccggcttgaaataaggacgaggtgcggaactgaaacgctctccgtaaaattccggacagggatggtgcagcccgtgggcgacatccgacaacacaaccgcacctgcggcaagtgcggcgaatatcttcgtccccaatccgctgctcatttcgggacgggtcttcatatccacttcgttgaatatcttggaaaagagcttcatgcggtggtagtcatcgactgccaggaacttgtcgtactgtttctggctgatttcatgggtgatgggttctccgttgataatggcggtcatcttgtatttgccctctgtttctgctggttgtacggcgatggcttccacttccacttcacgtccgtgttctccttcccggtaccagcctttgttttcgttgatgtatgacaagtcccgtccgtcaatcaaggctccttcttgtggttctctgatgatatgttcgtcttcttgcagtacggtctgttcggtagagtgcggtgcaaggctgttatcggattccaatggcaggagcaagtcctgttcctgccggttccgcatagccagatcctgctccacttcgggatgcagggcaatgctgatgcgctccttgctgttcagagattccaatgtgaccttatcggaatagtcattttgaatgacattgttcagaatctccaggcgtttttcaaccggatgctcttcaatggaattggaggtcagtgcggataattcctcttctgtcaggtcatagaccatatcggcactgactttctccgactggatggtcagtgttccggcttccgtatccacgatgatgccgtgtgacgaaaggcattcttgccatttctcattggagaaatagacgggtgaggtaatcagctccttgtaaggctttgccggttcttcgcttcttggcttgtttaccatcggggtgatgactgcctgcaaatcctgcaagacatcctgctggaatggctgtacctgctcttgcggttgccgatgccctttgtagtagaatccgtaaccgcccgattgcaattcgccgggtttcatgcgcccgtccgggcgttctgccaccataggtgtacctgcatagaaaagccggccgccgactctgcgcaagtgatagccttcctgctgtctgggagtccatccgaggaaagggggcggcataccgtacctgccgaccctgccatactcaccgatgccgatacggtagccgtgaagtcccattgccacacgaccgttggcgttgcgtgcgtggacgaagttgcggggcatatcaaaatcctcctttacgatgtccgtgaaggtctcgtaggctttcttgttggcatggttcgttccccagtcggtcagggcctgcatctgctgcctgctgatggggtatcgtaacagtggggaatcgtgcccctgtactaccagctggtagctgtcacccacaggtacgacatgggcttgcataccgttgcgcatcaaaagagcacgcatttcgggttgcaagtccggtctcatcgggtttgtgttggttcgtattgccatagtccgtgtttatgcttcaccgctttccatggcggcttctaattgttcactcttgtagtggacgaattgctcggctgccgtatcgtcaatcgtgagcgagtgcgccttgcagtattccaccagttcttcctgccattcggcagaaaagtggttgacgtaatccagccagccgtattctccgcgctccatcttctcgatgagcacttcttcgggataataggtgttttgtgccataattacagtgtttgaaaggttttacttgtgaagtccagcacccatattgcgttgggcactctttttctgttcgttccagagttcttccgtgtattgctcttccggaatatagtcgagattgccgtcatcgtccatcatccagcaaccgtaacagccgaaggtgtatttgtcccattctcttttggtctgctcgttccatttcttggcgtctccctgacagaagcggatgccgtccttctcgtgcaggctgatgccgactgttacaggctcgtcttgcatcacaaaggtcagcggttcgccctgctgcatcaccttgatttcggcattgctgagtttcagttcttctgccatcacctgaaggttccgggcgatgacctgcgtggggacggacatgacctgattggtctcggtatcgatctgtacgaaggcttttgtctttcgcccgtcagccgttaccgtgtcggcaagaatgactttgccggaacggagctgcttctgttgttcctcgctgtacttctccaaggaggatttcttcagcaccgggtagaacacgacatcggcttctccgttctccttgcgcacgaaagcgaatcggctatggtcggtgaccgtgtttccgttatcatcgtttaccttgatgggaagcacaggcgagtgcctgccgtgactgagttcttccaaaatgcgcataggaaggtcttcaatcatttcctgtgtgagtccgaactgcgagagagtttcgtaaggcagttcttcaaattcaaatcgtacttgtttcatactttaatatgatattttgattatactttggcaaaggtatatactattgttcatacttcaattagtgtagttctaaatagcctaattatttgtgtttatttatgctttaagtatgattataatgcagtattcatactctgaacttatttaatgttatattttggaggtaaatcaagacatcttttggcacggtcggagaactgttcctacatttgcatctatgagtaatacacgaatcgttatagcccttcttttgttattatccgggaaccatgtgaaagcgcagttcaacacggtttcctgtccgggcaatcactataaagtcgctgtggaaaccccatcccggacgtcaaacggaacagaggcgacacccgaaagcatcacctctgaaaacgagaagtccgtacccgacaaggttgctttgtcaagtgcggactcaaaaaagaaagagcaggtagcacgctatctcagcgtatgctatccgctctcgtatgtcaagatcaattcaccatatggctatcgcaaggatccgttcaccggaaaaaggaagtttcacaacggtattgacctccatgcccggagtgccaaggtgtttgccatgatgcaggggagagtgctgaaggtaggacaggataaagtctccggaaagtatgtcacgttacaacatggcaacttcaccgtcagctattgtcacctgtcgcaggtttctgtgtcgaaagggaaaatagtcaaggcaggggaagtggtaggcataaccggcagtacaggccgcagcaccggggaacatctgcatctgaccattcgtcataaaggagattatatcaatccttgtatagtccttgattatattcagtcccaatccaataagtgggacgctgtcccatcttttggatgaatcatacgtgggtgtctatttttacgcacttacgacctttaagtcctatcattcctttagtaaccaattccattgcaaggtcttctgcatcactgccgctcactgctgagactttcaaggtctcatgctcgtcaagttcggtggtaatctctaactggtattgatgtatcacagaaatgcaatcgttttctaatgctctttctgtcatttgggatgtccagatgattttagacaccggtgccttgcggatgtttttcaacattttcacctttacaggagcatccgttccgtcttcgtttacttttctgaatcgtttgcatccacacgaacagcaccaaataggtggacggagaggtatattgtcgccacccataatggcggtcttgcgatattcaagcatgaaatccatttccgtcatatccccggtgccatacacaatatcaacgacttcactgccacaaaccggacattttgatggcttgcgtgtcacgttgataatttgtggtcttgtatcattgggcatactcatatcattcaaaatacttgtttaaaaaatcttcctgaaattcattgagctctttgaattgcgtgtgtcgattgataccgatctcttccaatgtatctaatgacaattccttgccttcgtacattgtaaaagtcggtattagtttataacaattttcatcagcctgaaatggcgtaatccaacaagaactatcttcacgaacacaacttgtatcaacgacttcaagacgatagcgtacttgataatgccccttaccgataagatataaatagcatatatccccaacttccaattttttattgcgagactttttccagtaagcacatcctaaagtttggatgctctttacgtggtcaatcatgctttctttcccttttaataaaaatactcgtattggcttcatatcctatagttgttaaaacaatgtttttatagattgcaatatacgttcaaatcaatatttgatacatccttaatatatgaagagacacaacccaacaaattaagtatgtctgggcttggatttgaacagcttaatcctggttgcacaatattgatgtgcataatcagatcttttttccagttcacctgtgagcttaattgttcgagttcttcttcagtccctttgagtattctagaacattctcttccttgatatttttttatcttccgagcaaaaagacgattaaataattggcgacttttatctctatcgttccattttaagcatttttgagcttgtccgcaaacctcataaaaatttgaaatcatattgcttatttttcctccatgtgcgtatttgagatgaaataaatgcatgtgtattgcattattttcatttttgaatcctattaaatctgcaatttctccgctaccgtcatcatcgtaaatcagatcgaatttttccgagatgtatcttgaaaaatagtattgaatagagtccgtctcataaggtactacatgttgtgattcattttcaattttagtatccgcccaatctatacctatcaatttttcttgagggaatgggataatatcggaatttacacgcactaaattattagcataaagacatgaaccatcagcaaaatatataacaggtgctgcatcgtcattattaaaataatcacaaatatcatcatagagacgagtaccatatctcatttttagtttatttccccgtatctgtttaacgcgatatattgggcggctatcctgttcggaatactcgattatataggtgaatttagaatcctcaataagtatattaaacgtaattgtgctctttatctcgtaatccgctaattcaatagtagcataccataattgatagtcaacaaggttatgagataagaatattccatgctctgggtaatctctgtataattccgggtcccaatcaattgcaataggtgcaatttggggtaattcagaaattgcttgaactcttaaagtgttattgataaaagaattaggatctattttctcattttcaactaacttcccaatcattctagcccattttgtgtattcaagtagattacctcttgtatgactccatattttcccctttacagaacaacctacactaaccctttctccacgtctatagccgttaccaaacaaattattcgccgttaattgtttttgctcagtcatggaaataccttcttgaacatctttcccatagtaagacttaaacgaaacattacccattcgagcttttcttcctccaaaattaacaatggcaaaacgtcttatatcgtggaagacacgaaatacacagtgccctgaaattttacaggtatcatcttcgccaaaaatcgcctttactatctcatccgtttcacttaaagtactatatacgtaggcgtggttatatttgggtgtacaatatctatgaatgacaagaatattccaaagtaaattctgtacacattcgacattaccccaatcaacattttcaatgctgcctccgattacaactaatgtatctccatctgtggtgctacttccgaaacgataatcataaatctcaggagatagtatattttcccaagctttgggattccacgtgtttgaagttcgatatatgactgcacttaatggaatatttatactttggaatggaatttttgataattccaaattgttaaatgactggatgaattgattaaaatctttttcttgttcagtcgttccatcatttaggagtggcaacaagctgttccaatctgcatccttagcatatagttcttctagctcttccaatattggaggatatgcaatgttcgtaataaaacttgcatttccaaggttagaatcatatgatgtacgtgtaaatcgacctatgaattgtaaggtgattggtaaactctgctttgcgtcgtgaattgctgcaatctttaattcaggcatatcaaatccttctcccaacatatttacgcagacaataattttatgttttttgtcttttatgttgtttaaaattgatttttggtttggcattgaactaaataccatcaccggatttaaatcagagtattgctgatatatctccattacttccttggctctttgttttgtactgcatctagccataagaatatggtcgtatccattctccatatcagaacggagttgcttaacagctacctcggctatatgtttatcagcttgaattaaatcatactcccttattggaataaattttataggtttgtaatatccctgcgattgtgcatcttttaaggaaaagttatatataaaatctccttttaatcttcggctatcatttctgaatggagttgcggtaaatagtgtgactttttcatcatcaaaagagtcgatgaactcgctccatgttttagcttcggagtgatgtgcttcatcaacaaatagatgacttatgttttcctttaataaatttataatctccgattcgcaatttgtaataagaggcatagtcgtgattataacatttgatttttcaattaaagtgtaccaaccattataatccataccttccttaacaataccaacattcggataagagcaatcacttgtaactattccaaatttgtgaagtacgcccaaagtaaaaaatttatttgctaattggtctcttaacgcatcagatggaacagttacaagtactttggcacattgattcgcaatgaggatacttaacatggtttctgtctttcctgtcccagttggcatgactattatatttctgccatgatgaatttgagcctttgacataaacgcatatatagctccaagttgcggagcacgaagccctaaaatggattcttgaatattttccttcttataaaggaatttacctctccaagaagctgttatttcctcaggacgtaaggtgtctattttggggtgtttaatccatctgatagataaaatatttcctctaagaaattcacttttgcgaggtatcttgtttgttaatacgacatattgataaccatcaatactatgatcattttcatctcgcgtaagaagtatttctgtattatttgcgcgtataacaaagggtgaggtggaaacaatatcaaatgtagcttcactaaattcagtagcaaatccgttaagatgctcaactcgattgtttccacaactccacaaaagttggattatttcgaaaggtaattttatcataatctaatcttgcttatatcaagtgcgttacattgattttcttgtactttttgcccatactcagtgcaaaagccatttggtctttgattatcagctctcccttttgaagcccagcaatggcagtgcgaatttcttgaagttcattgccacttacaccaaataaatccttgataaccttgtcatcaatagtttgctgcttcataatgagcggatattgagcattggcataaaagtcaaatcctttgctcttgaaactactcatattttgtgtggcaagaatgatgcttaatcccttatttcgacctacggcaatcagattacgcagaggacgattgtcaaagtcaagcatatagtgagcttcgtctataatggagaaatggcgtatctgaaccacatcgtcgtttgttgcttgcttttctaactgttcatagatgttattcagcttagagattaagaagtacacgattgccttggcaataggcccgtccttcggataaccatccatcttgatgatatagcaatcaccaatcaaatcagctttgtcctcttcctcaaatatattggctcgtaccaactgtttaagtacagacgaaatactgtcgtcttttgcagggtcggtcattttagcttgatattccttcaacatcattgtgaatgtgataggcgatccgctggttttcttatatgcttcaacaatagcctcactcagccggttattcatattggcacttgccgaaactctgtcaatggaacagagagctgatgccatttcagacgaatagagattgatttcgttgataggtcgccctgtaaagtctttgaacggagtgaatggaagcggatgctcgatggggtcaagtatgcaactgcgatccacatcaaagtgagagagccaatgattgttttggatatcgctaaattctcctttataatcgaataacagaaaatttacaggatattgcgattcggaagacaacgctctaaattgctgcatcaatacagctaacaagtttgtttttccagatccggtagctccagctatgataatttgagagttggtaatgttgcggctgttgatgtcaaggttcgcttccatttcctcgtctccatagttacccacaagtagattaagcactggaatgtcttttgtcatagccaccttgctgcccatagaatacaaatatgtatccaaattgttttcttttatcagataatcacgaccacgaagcatttccgctgctatgatacgtgaaagggtggcgttctgggtccagtcaatattcaaacttgaatatcgtaatttcaaaagagctgcatatagggttgacaagtcgtgcatggtaaagaaactggggacaatacgtgcagaacttgttgaaagctgaatgtccttaaattcttcctcttttcgctcggcaggaatactcagtcccacaatgaaacagattctcattaccttattgagggtaagactcacacgcttttctctgtccacaatacgagacagattgattttattctccatcagatctttgacaggactgatttcatccagcagaccttccatttgacgtgtatttgaaaaattgatgatactcatgtcgttactactgattaagcgtgataccaaaatagccttcatctatggttgtccgttgctcttccacattcctatgtagggtataggtctttgagataaatggctctaactttatatagtcgctgtccgttctgatttccgaagtggtacacaacagaattgtctgttctgccaactgcgggaaatactcttccataagtgcatcacggctttcattatcaagtacgcccatcaccgtgtctatcatcaccggtggattatagtcgcctaagttacgaagcactttcaaaagaacttgaatgaatatctgcttggatgcagcgttgagttgattcaatgagatttcatttccggctgtatggtatagcttaatattgaatttttccatactatcggataactcaacacgcccaacatgtcctttataggaaacaagcaacttgtttagttgctcttgcatttccgtttctatctgtgcttttttctttttcaaaagcatatctgccactttgtcgaagaatggacgaagtttcatcaatgtgtcatacttcaaatccggctcttgctgtatctgtacatcgtattgatgaatgcgtttctccaaacgttggatttcgcctttcaagttgccttccagcgatttttgcttttctatattatgtttggcttcctcataattggctatcagcatactatttccaccggaacgagtctgttccaatgtgcgcttttctgatttcaaattatctatgttcgctaattgaacctctaattcttgtctttttctgtcgatagaaacgaactggttatgaccgcctttgccgggcagttcacgaagagcagttacttccgaatcgtctaaataatcatatggatcttctgtattggtagcattctgtaaagctaccatatgtgctactacattttcttcatccaccgcatgactacatagggacagttcttttagatattctataattttggaggttacatcacgtaacgtttctatcggataggcaccggtattctgtttttgtagctgctcttttacacggagaagattgttgatttcctgcgacaggtttgatgccagtttgggcaggaacacattgatttcaatgttctctacaaacgacttcaagacctctgcataatttgcagcttcgtcagtgatgttttttattttgccgtcaatgtcttgtatgcgtttgttcaggttggctgtttgttgcgcaccttcttttgcacgttgatactcttcttctaccgaagtcatatatttgtacagcctgtcttgttcggcaagacattcattcaactcacttatcaactgttccttttgaccgcataaggcattgtattcctttgcttccttttctgcttctaaacgttgttgcgcccattcctgctggagtttttctgatgcgtgttttagttgtagatattttttgaaaccgagcacgttttcaaagttatctcgaatggtttgctgaaagacgttctttttcagtagttcgctcgattgcatggcatcaaacaagaaatattggctgagttcctggggaagattagccttgatgattttgtttatctcctgttcggcacgtagtctgtctttggcggctgtcatggtaccatacacatacatattgccattcatgttgagagagacactttcgagaggtcttccttgtggattaagcacgtaggttcttttcaagatgtatttttgctgttgtcctaatactttgcctacaaatgttatttgcagacttatctccggcttcgctgtatttatagcaccttgattgagcaattcaatgaaatgttctttgctctctattttcaacccgtacaaagccccactgatggcttcaaatagagtcgttttaccaccaccattcgatcctccgataaggatgattggcctgtcatcatccaccgtcaaatcaaggtcgagggccagataggttttatagttgcttatttttattttctgtatgagcatggcatctaaattttattgacgaattttctgaatggcgttacggataatctcttccgtatcgttgtcactcatttctatcacatctactttcttagcgtgatacgctttaagtatgtcttcactaagccaatcaaagtcaatctcttctttttcacagattgcctctatcatagccaagtcatcctttcggatgccatagtgtacaaatttggggtctattccttttgccataatcatcatgcgttttgaggatagaaacaattccagttcaatgtgtcggtagtgttctttatgggaagcggcgagaacaaccagttttcatccttccgaagaatgacaccaccgtagagcggctgttcttccgttgtgttttcttttatgtattgcaacaaggcgttatgcttgtcggacgcaaacacatcgctgcctatacttttggtatcgaacagatagatatgtccgttcttcatccggattacaaaatccacgtagaagagtgattttgcctgttcgtctccggtggtatattctatggcgtaatgctgtttgcctttatccccgttcttataccaccagtctatgtattggctgttctgttctaaataggcaacaaaatctttttccggattcgaagcctgattgagttgcacaaatggcagtagcgcatgattaccggtttcttctatgtgacttgtttcgttatcgtatgtccgttcttccggcacttcccagccgtatttcctgaatactctttttgctgccgattctttgcgggccttgtcacggatacgggcatacctttccaaagcggagtcgatgatacggtcgaatttggggcggttcgaatggtagagtaccacttttttggcttccgtctcatagattccaaagaaatcggcaagtatctctaacaggtaacttgctattttgtcagttcttcctttgctctcgaactgatggcctttagtggcaatgtatgccataaacacacggtctatctccgtggcttttctcgcgtattttacagtatcaacttccagcacctgttcttcattttggaagtgtacatcttgcggtatctcgatattgatgttctttacatcaaggcgcaaggagttagccacctttttcctgttttcattgatttgaaggtcatcgctatccggcaatgtattgctttcttcatcattatccaacttggccaactcctccaacgagaacagcaagttgccttccacaaagtcccaaaacctgcgggcttcttcgtgtaacaccttacggaagtccgggcctaaatagttacgttctacattggggcgttctgtatagcttgacggtaagtttacatttttcagattctcacggcgatgcgcggtaatggtattgttcaagatatatccggcatccgccgtaacaatctgtatcttgtcctttgcgatgtcggtaaacacatagccggagttcagtatctccttttgataatgtttctgctccggcatacgcatgatacgccccactgtctgtatggtaaactggtcgctttgcaatttgcggaagatgagcaataccgctgcgcgagggcagtcccaacccaaggcaatcgcctctttgaaaagcaatacctctgtcaggttatccggcttttcaaggtctgtcagattctctttctcgccggcaagccatactgccagccgatgattgtctgttgtgatgccacacatcacttcaagatatttctttacttggtcggcgatggctgtatcttcggctgtcatactctctttggtgtcgttaggcaactgaatcaacagcaggggattgacgttggaacctaccgctttatacgcttcggctatctggttacgcttgtccaatgccgctttgataaggttggcattgagttccagttcatcactgaaattcagctctatttccggattgagcaccacttccttttttatcatttctgcagcaatcacatcctgacgatagaccgtgaccttttcctttggattggcagttttgggagtggcagaaatacgaatctccacagtcggattgattctatcgagcacggcagccgacttgtccgctgtcttcgaccagaacatgtgttcctcatcaatgatggctacaataggtaggccgaattcctctttcgtcctgtcggttatttcgtaaagcgaaagtgaacaatcaccctcacgtaccattacattattctccttattcacgctttcccagtttacaaagagtatttcaccgggacggataccttcattctggtccagttcatcgaacattaccgggcgaagcgtgcgtgtctcctcgaatgcgcctttcaatttttcataactctgtatgtgcagtttgcgtggggcaaaccatataaatgccacttcctggtaacggctgtcaccacggtcgtgcaattcgtccatcagtcctgccagcatctggcaagccatcacggtctttccggctccggtagtcgcctcgaacactaatttattgcgctgccctccaaggtttaacaggcggatagttttatctaccaattcggttacggctttctgttgatatgctaaattcttcattgttttccgtctattcctttaattttttctgttccttttcaaaattctccaagaaatgaatttccacaggcgatagttcatacatggtccgttccttaaacttatcatattccatatcggctttctgtttggctatttctgccgatattctgccagcatgggtaagtagttctttcccggatagtttgagaaagtcgtccaacttctgaatccagtctttcatatacatgggctggtgcgacttggcttgcagttcagcaaaatcaaggtataggctgactattctattgagcgtatccaattcatcagccgaaagatagtttttcgctacctctgcatcagtacgtttaggcattgcgcctgtccacgaggtcaatcccatgaaatccttttctgcatcggcacgttcatatattacttcagcggcagtgtgtccgtgagcggaaaagtgcatcttgttctgtacggtcttgaaaaagagttgtgtggcttctgcccgtgggtcatagtctatgcttaacgcatagattgccaaaacctttcggtagaacactttttcggatgagcggatgtcgcgaatacgtgcaagcaattcgtcaaaatagttgccacctccggcacgtttcagcagttcatcgttcagggcaaatcctttcacgatatattcgcgcagtacatttgtagcccatatacgaaactggacgccacgatgtgactttacacgatagcctatgctgattatcatgtcaaggttgtaaaaggctgtttgatgcgtttgttgcttacctatgatagctccgtgttgagtggttgttgcaaaaaacgcaacaaccatatctgcctgcaactcaccctcttcaaacacgttttttatgtgccgtgagatggtggacttatttctctgaaacagttctgccatttggtcggcagtgagccacaccgtatcgcccgacagggttacttctatcttcgattgcccatctggggtttggtagagtatgatgtttcctttatcctgctgctcgttcattgctcgtcctccttttcatcaaaattaagcataccgttgaatgctttgtcgtcattgctggcagcatcgttttcttgttcaagagtgatgtcttttttctttggcaggatgcgcttgtaggcgttgtatatggcctgcggaagagcgcaaagctgcactttgtcctgtacctcttcaaattcaccttcccacgggtcttcgcttggcgagaacacatacacgcgcatcttcccctcgtaatcagtctttcggataaggtctgccaacagcggcacggcctcttccttatatataatcatcatacgcttcttgccattgtcgaaatagcggaacacattcttgtaggtcggttgttcaccgaattttgtctgttcggtatagaggtcttccttaatgcagagcatatcggtggagaggttcatcagttgacgcatattcttcatgctccggcttctgccgacaaaacttgtacgatagtagcgcagtgtgttgttctttaagccggtgacttcttcacctttaggtgtggtgtagccattgattacccgtttgtttcgttcgtaggtcacttcttcgcagatgttattctcattgttggtgacgaggatgcacttgcggtgcccgccatcttcagcattgagttgcatagtggcgtgaagggtggtaccggagccggcaaagaagtcaagaaccatagcgttaggtgatgttacaactgctgaggatagtaagaatttcacaaaggttgatggctttggaaaagcaaaaggtctaatagcaaaaatattagctatttctgctgtaccttgggctgtgttgaacaaatctgatgtgattagattcctataaggtgttgtcctatctacctgtctgttagagttatctactttttggtaacgcttacaatatactgcccattcatttttgtttttcttaaaaacgataaaatcattatctaacccccattgaacttttgttttactccataaatagttccatccttcattctgttgttgtcctccacccgggtatcgtaaagttccatctggcattttaattggaaaattaagtgcttctgaataatgtccccctactcgtcttcgatcaagtttatccaaagtataatgtcctctctctttgatatgttcatccgttagtttaaatgtatcatctgaaggtggctgtccgtcaaaatgagcttttgaacgatttgcagtatagactaaaacatattctgttgttgttacaatttcattccctgtattagagcctgctgttgactgccatataatattggttataaaattattatttccgaacacttcatcacacagcaatttcaattgcgcttgttcgttatcatcaattgagataaagataacgccacggtcagacagcagttgttttgcaatacgcaaccgcttgttcataaacgacagccatttggaatgacggtagctgtcttccttgtcaacaatacagtcgttatagacaaaatccttgtttcccgtattgtacggtggatcgatatagataacatcaatctttccctcatgcgtgtaggcaagtgaggtcagggcttccaagttatcaccctcgataaggatatggttcggtgcattggcatcatcgctgattatggctttcatggcatcctctatcaataccggcaactcatcccgcaaacgctcctccacatcctccggcttatcctcccacacaagcccatacttcttttgcttgcgcagcaggcccaacagttccgacttttcttcgtttgtcagtccatcgagctgcactatcttattgtataattccgttttgttcatatccacgtattatcatttaacgagtctgacagtctggatgctttcctccaacgaggagttcaacaactctttcacatcaacattcagcacattggcaatctgcaacagagtttccaatccgggctgtgaggtgttcgtgcaccatttagacactgttgccggatccttgcccaattgttctgccagccatttgttggttcgcttcttttcaacaagaacgactttgattcgatttatatctttcgtctcttccattttggtttattatttaccttaccatgcaaaagtaatgaatttattttattcagacatcattcaagttatatgattttccattgaaattgcgaattagttcaatattcctgcttatctatgattattagatcaggaaaaagggttatctttgctctatagttattttatgataagactggtacataaagaatggaaaattatattacacctcaaatagtcaggtatcaaaatgtgtatgatctgttagagaataacagaaccacttcgttgtttggtgtcgaagaaaatttgtcaatagacaaattgcttcaagaaaaatttgtttgtatagtgggtgaacctggtattggaaagagtcggcttgttgatgaaataaagaagcaaatttctggtcatttgtatttatgtcctgcatctaaatttaatttagaatccgctccgaccaatgaggatttctgcataatagatgccttggacgaggttgagggaaatatattccatactgttttactttcaataagacaatatagggaaaataatcccgaaacaaaggtgctatttacttgtagaaagcattatgtggcatcttataaaaagcatttctcagtttgcagtgatttaatttttattgaattatgcaggttgagtgagcatattgtaagtgatgttgttaattgtagatgttcgaatataacaaacgaaaatatcagtaaaagcgcaaagttaaaagagcttctaacagttcctagatatttgacatttttattggagtatgatgagaaaaaaggaggatgtttaaatgtcggagaactttttgagtatatgattgtccgttcaatacaaacagccatagatgtttatccgaacactacgaataatgaaagtgttaaagttcttatacaacgagtattggaaaaagtggctttcattatggaaataagcagaaaggatcaaatttcaaaagatgaattatatacggtcttagatgaagtagaaggcaatatgacacagatgcttattgctaattttgatttgttattctttgagagtcgtatattaaaagaaacaaatgggatattgcaatttgaaaatactgaactacaggaatatcttgctgctaaagaattatgtaggcaggacaatattgaaagtgtactttatgatgttgctgtgcataaagaattgaaacgtatttacataaactggtacgatgttattcctcatatttcatatgcggaagataaaatacatacatttgttaatgtgctaaaacttattgtggcatatgaatctaatcttgaaaatgagccatttgaaactttgctgaaatatatagattcttctcttctttctcttcaacagaaagaagagttattcttcatcatttttgaccactatcaacgtgtacctgtatatattaactggagaggggcaatttgcggattattacaagaatgctatacttcaagttgtaataataaaataatattggctgtagaacggcttaataagattcaaataacgaatatctgtactatattggaagtaattgccgaagatgacaaactgagcaaagaagttttcgaccattggaataatgcagcaaatattctcatgcaaacaggcgatgaggaaaaacaactggtggctttaagtttgtataatgcactaaaaaatgaagacgaacttgtcaaattatctggttcatacagtcgttttactgaaagagtgaaagaaaaatactgtgaagtgaccggctatggaaaatttacaaataataatgttgtagattgctggttggatagttgctatgcaagtgattcatatgcaataaatgcagtactatttataatggatggtcctacaattatttatgcgtataataagattacagaagctaataaacttggtgatttttttaatcataataggactttacatatccattatgagtggcatttaacgaaacaatttcatattgcgtgggatatagatttagaaagtaaaaaactcatgacaaaagttattgtgagtttcattaataatcatctgtatatgagctatacagagatcaatcctattattaaacaaatactgcttgagaaaacaacaggatccttgtttattgatagttttgatagagtatgggatttagaagatttatttcgacattttgatgcagaaattgttgatgctgaacttatatcttctttagacaaacttttacatgaaataaagataggagaatggcatatagacaatattctaactgctcttattagtaaaatcagaaatgatgaagttaagagcatttctatatccgaatacataaaacgttatgcagagacatttgaacgatgggatgaaaactcaaagaaaaaagtagaaagtcaaacaaattcacatgaatatcagcgacttattgattcttatcaaatcctttcaaaactaaatgtacacgaattctacaagtatgaagctgcatttgaagtatctaaaaatgtagaatttatacaacaacaggaatttattcaaccttttgtggatgttattgcaaaatttttcacagaactaaatttggatgaaatgacattaaagaagacatccgaaaattcttttaatctatctacatctttaattaaaataccgtattttgttaatgcaatttatcggttaggattccgtaaagtgttggaagaaaatagaactgttttgataaagactttacctgttgtctgctgtactttgaatgctggggccaacgagataaaggaaatatacaagtctattatttgtagtattagtgatgatgagaagaagcaacttgtcgaatggtggaagtcaagggaagatgattttatgaatattagtacggaggatgttttaacctgtattaccgattatggaattgatgctttgtcctataaagtggaagagtatatcgaacaatataaagccaatcaagactttagtcacagtattgctgcatctaaagctttagctcttgtatctgaagggtactgtaattggaatataaataattacagagcattgttcgattctcttgctgatgatagtattggaagcataaaaatgcagtgtaatgacataatgattgaaaaatatcaagatccagaggcaatgacatggaggattgaatatttaaaaaatcatgttgtaaagtctctttgtcgtaaaactgggtatgtatatgcggtttctaaggaagaatcagaaatgacacatccacagatgttcaaatgctttatgagcataaaaaataatgagagactgattgaacaaatgtttgatttgtttgattttggcttatcattatgtataacttcagagacacaggaatactcaagctatcttcttaatcagatatgctttttctttataaataccaataatattttttatatattagaattaagaaaaaaggtggcgtattttaatgatacaaatgcgagttttctcgtaaacaacattatggataatgctgaaataatgtatttgaaaaaagaaaaaattacaattggtaaagctattaagcaatacaataaatgcgtcaaagaatcacatttggaaatccggaacgataacgatttaagacgatattttaattatatttattctgaggttcaaaaagaaatacaagaccaaggtatatattctttagtacgacaagaggctttaagtgaagattttattcagagggagttgaaaaataccgtcatcaataaatgctgccaaatgggattagaggctgttcgtgtagatcgggaggttactctacaagataataagcgtacagatcttcttattcgatatggtttatgtaatcctattatggtagagcttaaactgcttcacaataaagaacttaaaaataaaaaagaacgtcaggagtataagaaaaagttcatacaatacactaatgcaacaggtgcttgcttgtctgtattttggatatttgatgttcataaaaaaggtggtaattgttctaattttgatgatttgaaaaatgaatacactgatttaccacataccttagtattgctaacagattgtaaatgtagtagttgtattgacactggcgtatcaaaaaatggaacgaggcctaaaatcaagaaaactcaaaatagaaaaaaataaagcattattggggttggaatatgggggcaatgcctgatgatttgcccccattagaaaagctatttcactttatatttctgaatctcttgtatcatttccttgacatcttctccaacctgtacgaagttcttgtaaaggatgcgttcccgttcatcccttgatttgaaggtgtagaacttgggaagcggtacatagccggcttcttccttttttatttctttcatgtcgaagtctgtcttgcagtaaaacttggaggtcttgaactcctcgctttcctgaatgttcatgcttccaccgcttcctgtttttgtcttcacaaaatcacgggctgtctgaccgcatatccatccggtcggcatatcggagattttggatgcaggaacaagactgtccatgttctcattgaggttgatgctggttttgtcccggtcgatggtcacgccctttttgagttgtaccaccttgccgaagatgtcggaagacagccattccaaggtctctttggaacgggcagaaccgctgaccacattgccgacagtggtgataatcttctgcatacctaccttgccataatccgcttcgagctgcggaagttcctggaatcccaacgccactgacaccttgttgcttcgagccgtaccgataaggcggtctatcttgtgaaaatacaaagtcggcagctcatcaacgatgatgcttaccgggatatttttgccttgtcccgtgttcactcgtgtaaccagacgattgaggataagggcgttcagcgcaccgatgatgctctccatttccgggtcattggcaatcaagagataagaaggacttttcgggtcagaaactttcaagtcgaagtcgtcaccgtccttgtggaatatccagtaactttccttggtggcaaggcgtgaggtatagacacgtagcgtaccaatcataccttccaactgttccattgccttgttcttcaaagcggtttgaaacggaccgagcaacggcgtcacctcgttgtcggtctccaacacctcgaaaatggtctggtaactctcattgaggaatgacaggatatgtggcatatcggaatactttccgagccaataagccggttccacttcctcgcctgcggaattgaacacccgtccggtgggtatcatccgtttggtctgtttgtcctgtaccttctctgccgtgagcatattgccgtccttgtcgtatggctctttgccccagttgcagaagaaatagatgcaggctgcaaggaagttgacagcggatgtctgaaagaactggtcactgccaccgcctccttctttcttgcctttttgtaaggactcaagcagggtttctgcggtttcagatgcggcagcaaggttgttgatgtatttcaactggatagggttcaccctcctcgaatactccacatcaacgaaattgatgatgttgaacttgcaccccttgggcagatttccgagcttctggtttttcttgtaatgatagtataatttggtagccaaggtcggaaacttataatcgtaaacgactaaggcaaagccttttgccgagtgttgccggataaacggttcgataatggagaaagtcttgccggaacccggtgtgccgaccacccatgtgcctcggaaaggattgctgatgttcacccaacctttgcggaacttccccttgtaatagtagcgcatggggatattgaccgaatacttgttctcctgcaactcccggcactgctcaaaactctcattctcaaaattgaaacggtctttcagtaatccctctttgaggaacttggaaatgttgtcaagggcaatgtgtaccagtaccacaccgattattgaggcaagcatataaagccagatgttcaaccgtaaagtgtaaagccttgtttccatcggatatccgaacaaccaaacagacaatacaaccagccccatacctattataataggataaagaacttgtttccgtgcattgaactccagtttcttcttgttccttgtccctatacaggtgatgcatataagcaggaatgtggctaacttgctatacgcgagattcccgtcattgtagattacccaccgcttgatacgcccgtgtatgtcgcagagtatgccgccccaatggtcaagcatggccgggtcaatggcatactcgaaaaactccagcagaatggagacatagatgatcgaacggaatatcttgtaaaaaccttgtaactctttgctttcttccatttcgtttccagttattcgctaattcttgtatattctgattcttaatctctcaaggtaatgattgctcgtaccttgtgcgcctgtgtcttgggtgtttcctgcatcgagccgcttcccatggaatagagccacgctttcgccttttcctgcccggccacttccgtactcgtccagtaccagcagtcatcggctgcatcgggcagttcgtcgccaccgcacatcctgatgatggggtttatctggctcttggcattatagagcatccgcatctgtgccacggatgggatataggacgactgtccgtaccgccacagggcgaagactgcttctgccataggcgaggtggtttctctggtgtcgtagattgcaaaggtgttttcgttgccgtccagtgccgtgatgtcagtagatgtgcgttggtttacccctatgctatctgcaaaagcctccggagccaagtcccacaggtaaaccgcatagccgttgccttcaatggcttcatcgtgattgacatggaacaccacggcaatgggctgtttttcggattgcttgaagtctgataccgacaacactttgccgtccgtacacaggatatgacagggcttcattgccgtgtccgggaaatcccggtgtgcgtcacaggccacgaataacatgacgatggccgacagactgaatagcctgcaagcgtttatgtataatttctttttcattttcccttagtttagaggtaattttacacctaagacaatgcccgtgcggaacaggtcttctccttttatcatcaaatcggttttcacctggcagaaaagtctccagccacctcgaagtacgtaattgtgttcatagccgaggtggatgccgcccaagaaccgttttgtgtcactcccggccgatgccccgatacggacattgccgtaatggttgcgaccacgcgccacacaaggcttgtaggctactccgaatccgtaactcctgtaattcctccagaatgattccggacagatatgaccgcaggatgcgcattcgtcccatttgagataaccattggcaaaaaactcccatgtgtggtggtacttgccctcatgttcgtatgagagggtgatgtccagcccgttttgatacaggcaaccgacacccaacgaaagacggtcgctgttgctttgcgctttaccgttcatggcaaatgtcattaccgtgaccaataccaataatatctttttcatcattcctcctccaataatacacggttaaacgaatcggctgaaagcacatcctcgtagtctatattcagatgtatgttcctgccgcttatctgtttctcggtcatttcaatggtcagtaccttgtcgttggggaaggtcatcttcttcaacacgatgacattgcggtagccatgacggaatgactttgcctgttcaagtaccaatgcgggagccagctctatgatttgggcgttggtcgccttggacaacttcttgtccgcgagttttacccggatctcgtcaatgtcaaaacggatgtttgtcttgttctcaatggagaagtcaatgaaaaaataatcaccgaccgcgtagatgttgttcaatctcatcgtcatgcggtgttcccggcttctcacgttgcggtatttggcaggagagttccatatacgcctcgcaaactgtgtcatatccgcctgtgacatactcacggcaggattgttataggcgttacgttcccggaactcgatttccttgtccgtcacggcttcctgcatccttgtggtatagagcaacgcatactgggtacgatagcgttccgtgacaatggtgacgatggccagtatctcaccgtcctcgtatcccgtctcctttggtttcagacggatcgtgttgtttatcggttggtcaccgactactttgtccgtggaaatatccacgaagcgtataggttcggaagcggtaatgaccgtggtcacttgctcgttgacggtcagttgctccagttcctcgtaagtctgctgggcgaatgtaggcaggctcgacaatgccgccgttactccgatacagatagtcttgataatcttcatatctatgattctttgaatggttatttactttgcatttcttttttccttgctgttgatgatatagacaaacgtaccgtatttcaggttgaccttgttctttttgatgttcttgctgatggcgttgctcgtcttctggtaggcatcctgaatagcctgcattccccattgggtaaggctgttgccattactgccggtattcatgttcatgttgctgttgaacgctccgcttgccacatctttggcggtttccctgaatgaacttgacggcacatacagtccctccagtccgtcggtatcatagagcgaaaggctgaccttgatgatttcatcattcaccagtacgctgttaatggttcccttgacccgctgcgaggaaaaaccgctcatgatggcatagagataagaaccgcttttgaccaccgtctcattgatttccacatcatccaaaagccgaagcctgacacggcttccgttcacggccttgacatcctcgtctataatcgccttgatcagattaggctcatgctcgttttgggcaatggtgttgaaatagtcggaggtcacttttactttcttgatcatttcacccggttcttcgttttcggaaggagcgtttaccgcccggctgtcttcattgattgttccgcttgcggacactccggtttccgtgcgttgttcgagactgtcttctgcaagcggttcaacaggttccacctgtgcctgcgcctttagtcgtgcttccgcgagggcacgctccagttctttgagggcttcctgctctctcgctttggcatcggcagcgtcctctgcctgtaatttctgctgttccagttcacccaagaaggcaacttcgtcctggctgtactgtgattcgtatttttccttgtcatcatcgggttcgtctcgttctatgttatccacagccgtgtagtcggcaatcttgccccacgactttgccatgttctcgtatttgcttcctatgccgtcgccgcccttgatggtggcatcgggcaggtcgggattcaggaactccgtggtctggagtgtcttgtcggctatctctgccttttctgcattgaagaggtcaaagatgaaataggacgcgcccaacagcggaatatacaatatggcaggaagcatatatttgggctgcctgaaattgattttctcgaatatccttttcattgttgtctggtttgggtgggttcaacaatgggagcaaccggctccttgtggcgttctctgagcaggctgtcctgcatttctgtagcacttcttatctcctgaccatgccgataagctttggtcagccgataaatgttgaaggtgaatgtgccgattacgaaaccgaataccatgacaaggaacagtatcttgttcctgttggcaaagccctgtatcttggcggccagtttgtcaagacgtgtcgcctgggcgaatttgcgaccggcattcacatcacgctcgtatctctctttgtattgtggatcgttcttgtccggcatcttttcgccgaacagcatcctgcggaatcctttggtgttcatatctgtaaattttaataggttgctttcgttttctgttcgatgtctttattgaggagggtacgccaatttacgataagcagtccgtgcggattgttctcggttctcggtactcgtttaagttgccctgccgtcaccagttcacgcatcaggatattgcttctgcgctcgatacgctgccgtccgtaataagtgaactccatattgcttttgtcaaaccgcacactgtcgcagtaaatggagaatacggcactcgttcccaagatgttggagtaaaagcctttctctttgagcgtgttgtactgtgcaagtccggtctcgtccaccaggtacatcgccttttccatcgtgtatttgatgtacttgtcatcgggaggaagcgtgaaaaagaagtggtggaacatttccacatgacttttggcttccacatcaagggtttcgtccatcgtggtacggttgaccaatattggcacgttgccgtccagcacatagactttcttctgtgcatctgtcaccattgtccgtgccgtccaaatgctgcttacgctgatgatgatgcagccgacaaggaagaacgagcagatgattcccactaacttgattttgttttctaaatttctgattaccattgtatattcttgattatgagtttacgattatcgcatcatggtgccgattgcaccggtcgctgtcattttcgcctgttgagccacaccttcaccgaagtttcgggttgagaatgccgtgtcgccttctggaatcatccatgccgccaagtccggaacaaggttcaggcatttcaatgccacgatacttgcagccataaggtagcctgccgagaaaaaggagttttgcagataagcagccattgtctgctcacttaccgtgattgccgtcaggttttccacctgtatgcaaagcacaatgtcgaacagaagcaggacataaaatccgacgaagtagagcatcgcaccataaaaatgtaccgtcagataccttgtcagccatttggcccaagctccttcccatttgggcaagaggctgaaagcccattgtatcggtccgaaaatcgtgagcattccgagcaggatttgctggcagtaaatcgtagcccaccagcctatgcgaaatacaattaaagctatgagcatcacgattttatctattcctacaacaatcccggaagtaagtgaagtgaaccaaagtttggctgcatccttttccatattggtcacttcgtccaccccggtctgttccatagtggcttctatcagattagggtcggaagttccgctgtgtgccacatccgcctgtgcttgcaggctggtgtacatcgtatctcttgcatagatgagttgctgcacctcctgaaatttatcctctatctgtgtggcttctgcctggtacaggtcatgagtgtaagagccgatacagtttgggatataggataggaaatccaacacacaccagttgcttccgctgtttaccatacccgtgtcagccggaggataccaccagcataggataattgaaattgccaatggcttgaacaacttcatgatatccagcggttcattcttgaccatcatcttgtacgccatacctgctgccatgacgattgcaaacaaggccgcgagtgccatacacatctggagaatccaccaaaacgggccttgtgaacctgtgaaggtggcatccgtcaggaactcgttggtctgaaaaatcacatcatcaatctcttcttcaagcagattgatgccgaaatctgaaagtatatctccgcttgccatctatttttccatttaattttatctgttcacactctcattaccgtctccgtcttcgcttccgtcatcattctgcgaccctcgcactgctgaccgggattcgttccagcgactcatggcattgctgataatgcttcttttgtctatctggcggttctccgttgccgaaaggagattcttcgtggcattgcggttgctcaactggacgagatatttcaccagtacatcgttttgccgggagacatcggcatagatttgcagatactctttcttacgctgcgcattgggcatataggcatcccttgttgccttgattgcgcattgatagacacggtaatagtcgttccaccgttctttttcttttggcgagccgcctgtcatcattatgcggtcaatgttcttctgaaactgccgcatctgggattctatcttgtccttttccgcaagccaggccagatccacttgtcggtctgccacattcaaggcttcaatcttggctctgcttgtgagtgcggaatctatggcttccgcttcatctacctgctgataggaagccacgcctgccgccgtgcggaatgtgagtttgttcttgaccgctgccgttttcttgtatttgttgtgcagcaacgtgtaataaagttccggtttgagcgcaccggctccggtttcttccaccgtgatttggttcatcttgggcgaatcgtggttgtaggtgacatattgggcgtttgccgcaatggttgccacgaacagcatcgttgtaaaaatccatttcataatttctctatttttagttatcaataatcctgtttacctgattgtctccaccgtccgaaagcatcgtcaataagttcccgtttggttttggtacgatagactttctctttccaatagccgatacgaacctgtatgtaccgccaggtctcgaaataggcacggttcaaatgcttctcgatattgtcaagagaacagttgatgctgttcagcaccatcagcaagtccgaagtggaacaggccgccgcacctgtggcgtacagaaccaaatcgctcacggatttatataggtattctccttcctgggctatcatccgtatggctccggcattgatggataatatcagcgtgtccgccaactctatgtgctttcgcttgatgaccttctcactgaaatcttcaagcatcgccttgtagtcggatattctttcgctgacccctttgtaggtggaatgtacattcaatgccgtgcgcagggactggtacatcacgtcaattacatcgaaagctctggtgtacttgtccagatccacgttcagttccttataacccaccatttccttgcggctgtactcatgcaacagtttattgctgtgttccaaggtggagcgagccagcaagaggcttcgctgttgcttgtggtcattgatataggcttcaaccgtccccacatcaaaactccattgcgcatttgcggacaggggtgccagcagcattatcaacagtccgagtatatatgtcctgcctcttttcatcgcttgccctccttagtctttctgtttcgtgcgttttccatccaacggtcgtgacattcctccacaagggaaagtctgcgcccctgatcatcgtcaacgggtggcagaacatctttcagcacgtcaatgatactgcgcctgtagtgcatcatcttttccaatgataccaagtcggcgtaaatcttcgtgagccgggaatccacttcacgggctatctccagccggtcgcttgaccaaagcaggtgatacatatcgtttgttttcgtgtcctcctgcggtgcagtacgggcgtattcagtcgttatcttgcacttcggatattctttcgcgatttccgctatgcggtcattgaccagttttgtcttttccttgtcgctcatatcggggtcaagcgtaatcacttccaccacatgggtatccgaatactccgttgccaagtcccaggagatttgcaggatagccctgtgtatcttgatgccaaggaagtatttgggctttcgggcgattttcagtgtcgccttgaatgtgatgatgccgttgatattcgggattgtgccttttcggacataggtgtagccgttccaggaaccgttgtcctgccaggtgatattgtaagccgtcttgcagtcttgcatgatagccggtatccggtaatagtcatcggtctgcacatcgttgtcgcttttggcttcttcttttgcctgtgcgatttcctcttgcttctgctgccaggcggcaagttcaggtttcaacctgtctatctccgctttgttctcattgtatttctgacggagaggaacggcatcctccacactggcattggcaatctgtttgataagcgattcgttttccgtttccaatgcggatatttgtgactggagcgcgtaaaccttgttgtccgcttcccgctgcatggcatcgagttcagacaaatccagttcctcgctttcagctgtagtcttcatcgcgcactctttggaatgtgcgttgagcgtacttccgcatttccggcacttgtactgggttgttccctgcccaagtgtcgcaccgtccgaacaggtgacactgattgttaccgtttcgcatcctttcagtttctcttcattggttgcctggtaatagttccggctgtcggaagcgatataatagacatagccgtcttcgttgtcgttaaactcagacagatgtgcattaagttgtgccttgaatgtgttcaaatccatcgaataggaatcgaacacgtcttcatagactatttcctcgttgttccagcttttcgtgacatggatttcgtaggcgtatgccttcttggtctgcttctttccttttttaatgatatagctggactggtaataattgatggtgtaactgaagccgtcattggcgttgttaagctgttgcactctgttccttgaccatccggcgtagcgttccgaattggaaagggcctgttccttttgcgatgcgttgggatagaagttcggatagcttgtcttgaagcgggtccattcaccaccttcaaggatgctcttgtcatctgtcgggggataatagtcgcagagggagacactgccacggtcacgcctcgcgatgtaccatcgctgggtgtagtaattcccggctgtttcgtccaaataatcggtaatccacgaagtgaggttgtagtcgctgaacttgaacaatcctgccacattttcttcactacccacgatacccagtatggtctgtccggcattgttctccagttgctcgaaaagtccgttgtaatgctcgtagatgtcaatgaccttgctgaccttcccgttcatcagctcgtgaaacgagttctgttgcaacaaggcgttcccgatattggtgattcccgaagtggcaagaccggctcccatccggtaaagtttgtccaaatcggctttcaggttttccttggtgaagttgcccggtattttggatatgtcatcaaagagccgttgccagtccacgttgccaatctcggaaagttttaagatggaggcgatttcctcattgatttccagaaaggcgatatcggagaaagacagtgtgctgttggtgacaacgctctcgaactgcatacagagggatttggtgtcatcgcacactttcatcagataactgcaccaatggagtgcggtttgtggagaacggagcatcagcttggcgacaatccatgtcttcgggataatcttgtgcgccaccaagtgataaatcctgcggtagtagtaattttcggtggcactgctccagatgcccaaatcagtgagtgccttcctctccaggaacttgctggcaaatattccggcagtggccacttccgaagccttgtagtgtttcagtatattctgcacctgctcgtcataatacgcttctgcaacggttccagtaccgtaggcggcaaccatagcggcaacggttttcgcatcgaagttcacgctgtaatactgggcatgaacttgttgggcgaaaatcgtggctattgtcattattatgagagcgaatcgtttcattgttgttttgtctttggttgatgaagattcaataccttcccggcagcattcactttttgggcaaacggcagggacttgcttattccggaagcatcccagtcagcgcaataacgctcgatggcttccttgtggctgcattgcagttcagccttgtagagtttcaaggcttctttctcggcccgttccgtggtataggtcatgtaacactcatgcggttcctccacaccatacacaccgctggtagtgccacggcggataaagacctcacgaaagaacgaacgcccctctttattctccagccggttgatggtaaagattttcttgcagtccacgtctgtcagaccgagaatagccttgatggtatcaaagcgttcacggaacttgctttggtcaagcagcattaccacatcggagttgttgatgatagcctcctttacaatctcagacccgatgatgtcctgaatctcttgtgtgaccacgcccactgaagcccagaactttcgggcggtcttatacatgaatttgatgtattctgccataagagggctggctatggctttccatgcctcctcaatgaccaggactttgcggttcttcttgatacgcatcttttgcaggaacacgtccatgatgatgagtgtcaccaaggggaacaggagcgggtcatcttttatggaatcgatttcaaagacaatgaaggtctcatcaaacagcgaactgtccatgttttcgttcagcgtcttgtcgtggttgccacctcgatagaaatctttcatcatataccggtaggtggaaatgtctatcccggttatactgttttcattgcagatgtcgggaatgcgttgtacggagaactcatagaatgtgttgaatgacagtgattccactttcagttcctttctcctgcgttctatctcgtctatgacagtttctatccgtgcgttcagttccgtttcactttcagcgcgattgccgcttttgtttcgttcgtcaatcaaaaggcttttgcgcaaatcctcccgttggggtggggtgaaaccatcgaaaccgttgaagtaggtatcgtaatattcggtgatgacctgctcgatcagcctgtcttccgttttggtgaccgtcccttggctgcctttccaaatcagcagcacgagatttttcaggaagcctgtcttttccacgttcaattcctgcctgttgatgcggaaagggttcatcgtaatcgggcattcctccgtgtaagatatatattttccacccaaatactcgcacaatccctcgtatgagttaccggtatctaccattaccacgtccgtcccttgctcgtgaagctggcgcacaacgctgttcatgtggaaggatttgccgctgccacttggacccagacagaaaaaattactgttgtcggtcaatttctccgcgccctcttttcctgtgatgtcgatagccacaggcacgccttgcctgtccgtgtaatatatcttcaaaggagttttctcgctatgcaggatgcgttccttgtacatcagacaggctgccgcatcacccaaggtaaggaaacggtcatagtcgggattcataccgtaacagttgcccggaaaggagttgacgaacagctccaactggttgtaggctcttttggaaatatggatgcccatccttgaaaactggttttccagatggttggtgcatttgtggaggtcggtgtccgcggacatggctactacaagattgtagtgcgtatagaccagttgcttgctttcccttgccaccacctcctgcacacgcttgatgtcttctaccgccatttgattaccgggattgggcatactcgcatggcggttcttctttttgtcaagcaaggccagttctctcttttggttgggaatgaatatcatctggttatacaccaccgcttcggtattgggaatgccggacacaaccgacaccagatccatcggcatactgctgttgttgacttccacgttggtgtagggatggatgacagacggcaggctcacgttatccacatccacaaggctatacaccttgcaccgtttgtctcccatggagatacattcatcattcaccttgaagttagtcatcgagactaccttgtcacggaagttcatggcgaaatagcggtcaacatattcattgacttcctgcctgttcaggaatctcacctgtacgccggcatcacgcagttggtcgtgaaccttgcgtatctttacaaggaagtctcgccacttcttgccgtcaaaagaaaacagacggcttttcttgacttcctgagtgatagtcaggtaacattcgctgtcggtataaggtcttccgttgaagtaacggaaataggatgtggagagaaattcacggttctcgtcactctcttccgtgaaattcttccggataaaaatatcctgcttgtgtatggcatagccttctcccaaagtctgggcaatggcggtgaaaagttgcgtgaactcatagtaagagtcgatattggcgcaatacttctgtaccgggttctccagtttcagcacggcggaatactctccggtcttggtatatatcacaccaatcccgtccgcttcttccacggagaaatagatgtcctgaaagatgcgtttccgcttgccgccagttccaaaggcatagaccgacacggccatgcccacgcaaagggcaatgaagactatgaaaacatatataatcattcggctgtttacaattaagggcaggctgacctattgaaaggtcaagcccacccacgttcaacattcaatatatccattcatggtcaaatggttttctgttacattttctttgagtaggcatagatgaacaccccacgttccagccgtttgctgtgcaatcccttgcgctgcttgaacagaatcagtcccacaccgcttgtcacggtgacggacaggacaatcagggcaaggacgaatcctgccatacagtaggctatgatgaagccgacaatggcgatgcctatcgtggctgccgcccaatagatgtagcgaccctgaatacccataaattcaaggggacgttgcagccccttgaacaatggataatccggatagtgttcctctttcccgttcatgatacctgcggtttaggagagtccgaagaacagaggaagtgcctgggctgccgcgataaggaagatgcaggctccgaccaccatcatgattttcttcttgacatcctgctcctcgttgttcatcgcgatatataccgagatcgcacccactacggctaccacaccggcaatggcgtaacagagtttcaccacgataggaacatacttggcgatttcctcgctcacttgggtcagtgccgctgttccggccgagtagtctcctgcggtagtctgtgccatcaaagcggtcacaccgcacattaccatcaggcaggtcatctgcgttttctttgaagtcgcgattttctttgcgaatcgttttactttttcaaacatacttgtcttgttttaattgaactttattgattgttttacactcgtgattttctaaattcgatagccgaaaaatgccgggaagactattgttgcacctatgatgaaaaggcaggccccgaccagcgtgagtatgtgcttggttattccgtcctcgcccgtgttcatcttgatgtatatctggaatgcggctatgaccgcaaaacctcctgcaaccgcgtaaatgatatactggacatagagcatcatcgtcaccacatagtcgtgcatggaagccagtgcgtccgctccccacgagtagttcacgccgccgcttttagcgaagacggaacaagggagcagcgtacacagtgcgcttagtattcttttgccattgtgtcgggtcatagttcatcaattacgttcttggtggttacacctccgtccggatgcaattctccaatgccattttgaatcatcagcttgtacagctctgcggagttataaggattggagaaggtaacctgtgtctcttccatgttagccttgaccttgttgttcagagcctcgatgacatcctgtctcggcttttcgtctgtgggatttgtttcctccgacacattctgtgtctcatcgatgtagtgtgtctcatactcgttatctccgatattgaatcccttgtcgttctccaccacgctgacgctttcttcctcgtcaaaatcgctcacgtcaaattcttcttctccggattttatcttttcttcgtttttaccataaaggtctcttgctatcatcacagcgtagtagatgatgtatgccacggtcagcgcaatggcgaagatgaaatatgctttcatatcttatagtctgattttagaatatgattaaaatatgaacgcaaaggaaatacaataatttcatactacgaaatatccttgcgaaaagcggctgaatattaaacattattctgagaaaatctaaaatcatactcaattatcatactttaagcgcaattttgaaccgaaaaacgagccggattgagacgaggatgaaagatgaacaggttgtccggtttgcccggcttaatgtctttacttgtattttccaaagaagatcagatgaaagtctcttattcatcaatgactattaaaccaatcacccgtttctttgctcaactcgtgcaaaatcattaactttgcaacagattttcaaggtgtttgtggtaataaaagacgaaaacgcaaaactgccatgtatattttgaaagacgaacagagaacaattaccattaagcggatgaataattatggcacttgctatcaacatagacgacctgctgaacaaacagaggatagaatccaatcggattgaatttaagaaaggttggaatccggtgagcatataccacagcgtatgcgctttcgcaaatgattttgacgaccttggtggcggttatatcgtggtaggcgttgacactgacgacaagaccggagttgccattcggcctgttgaaggaatacccattgaagagattgatgacatccttcaggatatggtcggctataataacaagatagccccgtactatatgcctcggacaagcacggaggaagtggacggcaagactgtactcgtaatatggtgccctgccgggattaaccgtccgtattctgttccggagaatgtaacggcaaagaacggttccaaggaatacttctatatccgcagtggaacaagcagcattatcgccaaaggtgaggtgctggatgagcttcgcgaacttgccagtcgtgtgccatttgatgaaaggggcaaccctgacattcgtttggaagacatatccactttgcttttgcgtgaatacctggtgaaagtcggaagcaaactggcaagcgagattaacatcagaccactgcaagagattctggagcagatggacttgtttgtcggtccgaaggaaaaacgtatgctgagaaatgtggctgccatgatgttctgtgagaatccaagcaaatttttcaagcggacacaggtggagattgtctatttccctgaaggaaggctgaataatccgagtaacctttacgaaggagcagtcatcacaggttctgttccgcagattatagaccgcaccttggaatacttgaagcgtatgctcgtgatgcagagtatcatcaaaccggagaatgactatcgcagtaggaaattctatacttatccttatcaggcattagaagaaagtgtcacgaactcgctttatcatcgtgactatcgggaatgggaacctgtcgtaataacagtagagccggatagtattaccattcaaaatgtgggtggcccggatcgaagtatatctgccgctgacatttcccgttgtgagattcttgtatcaaaacgttaccgcaaccgtcgcttgggtgaatatcttaaagaactggacatgaccgaagggcgttctacaggtattccgaccatacaaaatgtgttggagaataatggctctccacgtgcaaccgttgtcacggatgaagaccgcacattcttccgcatcacgattccttgccacgaagctgccggaaatataatagccgacatagccaacaaagatgcttccgtgaaggcatcaaggcgaggtgcactcaaaactgcactacaaactgcactacaaactgcactacaaactgcaccaaaaactgcactacaaattttggaacaaatacaaatcaatcccaaagtaaccatgacagaccttgctaatctgacaggttattcaagaaggtgggtcgcccaaacaatgaagcagcttcaggaattgaatgttattaagagggtaggttctactaagaccggctattgggagattatagccaaatagataataggaaaaatccataaccaggtttacttacacacatatccacgaaaatccctcctgtgcggagagcctttcgtggatactatatttctatcaaagggaatacaaagactaacgccttttgcctctcagatagtcattgaggtctttgtaattataataacattccgaatggtcagttacacggttgccacaaagtccggcaatagtttcgactgtttttcgcccggcaaggtcgttatccagatagcaatggatggcggtgtaccgttccagttccacaagacactttttcagattactgactgagttcatcacaagaaaatcggtaggactgtcgatgcagacatgatagtctccttttctatgaagttcttggtaagacaagaagtccataaagccctcgaacacgcagacatggttttggattatatccttgttatacctgatgacggatatgtctttcccctttatacatcctttataataaggattgcgcacctcgtaaccgccggtcttgttttcaaaggctatggcgaaatagtgtcttttgcgtagctcataatgaatttccttgcaatatagcctgccgatattctcgctgatatacctggaacggaggtaagacaacagggcatggtggctcagttctcttacttccacgttttccatttcttcctcgataggacaggggcggacactccggctttgtaactgttgaaaaggtacgccaatggcattctcgctgatacggagcaataccacacttacattgccagtacgataaaggtgttttcccagttctatgatgtcacctccggcagaaagcccaaagtcgtaccattcgttcaaattatcgttgaccttgaacgagggggtacgttcctctcgcaatggggagaggtaccaatactggcagccacgcgcattgaccggagaatgtcctattatccgcagatattccacaagccgtatctgttttgcttcgttgatattcattttagtatggtttacttatatatacccacaaactaaaccataccggttagaggtggaatgaagggttataggagtaggtacgaccgttttttgtaatggcatgattttccaacaggaacttacacaagtttaccaatgtgtttcttcctcttgaatacccaatgctctcatatccctttttaagagcttcaagcaaagattgatagccatattccgcgcattcttcaaaggttacttccaaggcggttcggtgttgctgctcggtcatatctatataagaagccagtctgtccattttgttctttttgaattgatgttcttttaccaggtgtgggagagagtcttctccgatttcaaatgcgaaaggcgtaaattccctgtcccttatgtgcatggctcttacttcgctgatttttccattttcattgttttttgatatttgcaggatagtctcggccttattgttcagttctgttccgatatgccctctggtattgtcatcccctttgtttagatgtaagacggtgtggatatgcagttcgtaatagcttgaccatctcatcagttcattgattatgtcaagagattcactgggactgtttatgtcatggattaaatcacggatgccgtcaatgattacgagcccgatgttttgctcttcgtggagtgcccatcgtataatatctctcctttggtcgggagtgtattctcgcagaaccaagaattggatgttgtcattttcctggtcagtaggcaatcctgccagtttgaggattcgatgaagcactttgtggcaatggcacttgctttgttctgtgtcgatgtataggattcgattcttgcaagatggcagttctgctttgtactttagaatctcctttccggaaagagccgatgcgacaatagcactgacattgaatgtctttttgcttttgggtttgccggtggaagcactgaaatttccgattgtggcaatggtaacaccgtctatttgtacgatttcctgtggaaactcatatttttcggtaacactcagccgtatatatttcaataaagacttatatttggcttcgtctatccgataattgttgggttgtatcatatcaggttgcattattttttccctccttttgttggtttgttcttacttttttgtcccaatgtgtaagcgatgatattggcttgcctttctatttctgtattggagaaacaggggttgcgctttatccatcggttcaggtcatccctgagaatgaatatgttttttccattcggcttatacacggtaagttctttctgcatggttaacttatagacatagcctttggacacttgtagataggcggctacctcgtctatattgagaaactcttttgcggcataagctatcttttccacattttcaagatgggatagcagttcggccaaagaaccgaatcgtttcaggtaattttcaacattcaggatttcctgctgaaaattttccaaggagttgttttcgaggaatgatttcaatccttcgatacgggagagtagtaagtctatttcttttctattcataattcttctcttgttatagcagcaggttgccctattgtttgtacttgatttctcattgcccattcgcaaagttcctttctgttgaaatacaccaatttgccgtttggcttgtagtgtggtatttgcttgagagaagtgagtttgtagatataactctcggacaaaccgagataagcagaagcttcagcggtagtcagcacttccttgactgcccaaatacgctctttcaactgtgcaatgtaattctcgatggtctggattttatccacttcgttgatcttttgttctaacgattggagccgttcaaaaggtttctccgttgccatcatcgaaatcatgttctccattttggagagcatcttattttcatttgtcgttcttcgatgtctcattgattgatgctgttaaatttgacaatgggaggtatgccctccgtgagtaatcgattacggagggcaaaggtagatgagtatattcgcttgattatgttgagattgttgagtatcaacacaattctcaatacaactctcaacaatttgttattcctttgttatacttctctgtttttgattagagtgatatacttgtctatgattgccaaaaactgcttatctatggcgttgggagtggtgtcttttatccgattgagggttgatgacatatcgtgttgggtcagtaatttcttccttgaagaactgatgacaagatgtttttgggcaattaccgattgccagttataggttatcacatcgtgtgaagccagtttgtccaacaataaaaccaatttgctgttgtttcttgaagtcacagtctgcaatgtgtctgccgcataacaaatggcaacattgtctgcatccaaaacttccttaaacaaacagacctcattggcaagctgcacaatgaggtccagagtatgtctgtcaagtaaaggtttgatgttggtattctgattggtctgaataggattccccggactgctgttgtcggactcggtagtggattccgacagatcaatggcgtaaaattcgttcagaagttttatgatcccattttcgtccaataggtcatggtcgaaatgtttgcgaatcaaaatttcatgcttccccagaagctctattaccgtgtggtaattctttagatgttcattcttgctccaggcatcattcgcatcgtgaaaccgatgtgaatgggtaaagtcaagcacgtatcgcctgtaacttttttgctgtgtggtgacttcgtctttgtaagacttatgggcttgctcaaccaaccggaatagcccttctttaccggtctgcgcaggagtccattggaaacctcgcatcgctcttttcaaaaagagagaggtgcaaagataatttctttgacataaaacattattttaagtattgttgtttgccacctttgcgttgatggcgtttttgttttgagtgctaagatagttatctgcaatggtttttagttgaatatcgtatgtgtcaatcaatccttttttgactataaaacgaaaattactatccatactttctctgttaggtactttatcacgttgcaagcggaaacagtttacgcactttacccatacatcatagggattgtgttgcttaaaggccaaatgtacaaagtacataagtgaagtctgtgttttcatccatactataggatgttcaaataccgtttcatcgaaaatacctttgaatgcggcaaatgtggtgtcggaggagatatatccaccgtcaagtagggcagagaacatggaatgtatctcatcttcgctattcggactgtaaaatacaactttgctcgtatgaataagccgttcatcagaagtttcttcattgaacgtattttcaatgtgtttgaacttatcacagatagcctttaatctaacatcatacctatccaaccatccggctcgcttaatccaactgtaacctgatacaaaacaagctttgtgcggagtgtgtccgtttatgctgaaacaacattctccttttatccacaagtccttcttgttgaatttgtaaaatgcctgatagacgaaaaaggacaactgccgttgcgttttaatccattctaccggcttgctgaatgtctttttattgaaaatgccgacaaatgttttcaagccagtgtcaggtgcgatgtatccgtatttcactaaatctcgatacaacactgctatatcttcttcactctgtggcgtgtagaatgtctctgtctgatgtgttggctcaaattcagtaaagtcaacttccgggtagagggctttggtcgtttcgtaaagtcccgtattgtatcttggaacacgccaagtgctgaatcgctttccatattcccttttccattgcttttcaaaaaggatgtaggtgctgggaagtttgcagatggtagatacagcataggctatcactttcagttgcagcggcttcgtttgcggcatcggctgatagtgttcatccaagagacctgcgcgtatggctctttgtaataatgtagccacctgttcattggctaaaggctcaatcaaatctttatattcgcctttcacctcctcttcttgccttttgcaaagtgacagcaacgcttgcatattgttcgcataacagtcaattaccttgacgtatgcagaatcaatttccagcctatgactttgtacatagtttacgacaggaacggtaaattcgttatttgttataaggtttgccaaaagaggagagggggcttgttccatatatagacaaatctctttcgcccattttccgatattcatccacgaagagtcaagtgcttcaaattcgatttcgtcatccaaatccaactggcttttcatttcgccgacgattcgggtaatcttcgttatctttataacggtttcttgccttgtcataagcacgggatttaatcaatgtccggaatcaatgatacggcattctgcttgtttttgtcaagcacctttgcataaatttgtgtggtcgccaactctttgtgtcctaatagttttgatactgtgtagatgtctgcgcccaagtcaagcataagcacagcgaaggtatgtctcccgcagtggaaggtcagattcttattgatattggcagccatgctccaacgctgtaattccaatgaagtccaagctccgtatgtaaatcctgtaaatacgggatcttccgggttgcctctttcaccgaggtatttttctgcctgtgaggaaatgtcaagatactcctgtccgccagtcttcttttgtttgaagacgattcttgtgtaatctccaaatttttgaacttcgctccatgtgagtttctgaatatcgcttttacgaagtccggtcaggcatgaaaagaggaaagctctttttagaataggatagcggcaaggagtagcagccaactgttttacctcttccaaggtcagatagtcacgctttacttctgcggctttgaatccctcgattccacgcaaaggatttacaggtatgattctttcatcgtaagcctggttgatacaggcgcggagcttattgaaataagagacttttgagttttgggacaagccttgaaacacatccctttccctacgtggaccggtacgcttgtgagtgtctttttccacattgttcaaaaaatccttgaagccgtttataaactccggagtaatatctttgaatgtggttttctcatcacaatagatttcgagataacgcaagcagcttctccagttaccccagtttccgtcagattcaggattcttgtgtctttcttcaaccatcttccgatagtattccagaaaaggagtatcttctttgaattggcgagtgaaagaatactctccattctgcatttcaatgaggcgtttggattttatagcctgggcggttgccaatgtctgtctgttttgctcacgctccagcggagtagtggcatcgatcagataaagtttcaaatactctttctgacgtttcccatttctgtagatgtcgagatacaagctcacgttaccgtttgccaacttcttttcccgtaattttacgggttctttctggattgttgttttcttagtcatagcctgttcctattttaatgagagatgtgattcattgtcttcgggggacagatttttgtccctcgcatccctttcgggggacaatctggggacaaaattacgaaaaaaatatgaaaacaggcagaaagtatggagaaaaagagaaaatgcaaatccttataaaatcattgatttttcgcactttacagatttatattttctctttttatgcttttcttttctttgtatcacttgccgatgcagaaatgttgaaatatattttgtagcaccatatcattcgtcacctcccccgcgatgtcgctcaaatggaagatgcactccctgatgtcctgggccacgaagtccccggaaagattgtttgccaatccctgttgtacgcgtccgatggcttctaaagcatgcgtaagggcttcgtaatggcgggcattggtcactatcacgtcgttctgggttatcgtaggcagattggcggcggctataagtttcttctgaagcacatccgtattttgccttttcttggcggaaataaaaatacattcggcgtcaggaatgatggaagaggccgcagacagcacctcatcagaatgagccgtgcccaacaaatccgctttgttgaataccaatatcaaatgctttctttccagacgcggaagtatctgccccgatagctgattcatttgcgacgttgcgtccgttgcatcaatcatccaaagcacgatctccgcttgttccagtttttggaacgtgcgctctatgcccagactctcaatcgtatcattggtttcgcggatacctgccgtgtcaatgaaacggaaagtaataccgccgatattggtcgtatcttcaatcacgtcgcgcgtagtgccgtgaatgttgctcacgatagccttgtcctcgttcagcaatacattgagaagcgttgatttcccggcattcgtttcgccgatgatggctaccggtacgccgtttttgatcgcatttcctacactgaacgaatgtaccagtcgggaaatgaccccctcgatatgatctgccaatcggcaaagctccgttctgtccgcaaactccaactcttcatggtcgctgaaatccagttccagctcaatcagtgaagtgaagtgtagcaactggttgcgtagctccgtaagctccttgctgaatccgccacgcatctggctcatggcaaggcggtgggtggcggcagatgaagaagcaatcaggtccgccacggcttcggcctggctcaaatccatcttaccattgagaaaggcgcgttgcgtgtattcccccggtcccgccaggcggcaaccgtgcttaatgagcaattgcaaaacctgttgcaagatatagctcgaaccgtggcaggtgatctccgtactatcttcgcccgtgtaagagtgcggggcgcgaaacaggctgacaagaacctcgtcgatgatttcttctccatcgtgtatcttcccgaaagtcagtgtataaggtttgcaatccgccagcgttttaccggattttgccggggtgaaaatgtggctggtgatacgaatggcgtccgctcctgagacgcgaatgcttccgattgctcctccttgggccgtggcaatggcacagatggtatcctgattcatcataaaaattgttatttgagttgcaaagatagccttttggggtaaaaaaaagaacgcgattgtatattacttactcttttttattacatttgctcaattttcgtagcctttacatgatacactttgttattatggcgcaagacaaaataaaaatgcatgattccgcttctcatactaccgagaaagacgagaacacggaactactgaaagagaaattattgaaggtcaactccgttctggctgcccatcaaattgctctctgggagataaatatcaataccctggagtgcactttcactcaggaatatttcgaaagtttaggcttggataaagtcggcatccgttatcagaatttggaagagttctgtagctttgtgcatcccgatgataagcatttggtgtcgttggaaggctttcaaaagaaattggatggctttgatgagtccaatgtcttacgggtgcgttgcgtaggcgcgcatggcgaaatagtctggttggaggaccacctcttatctgtagagaaagataaaagtggaaatccggaaagcctcttatgctataccgtgaacgtcaccgggcagtgcgaacgcgaaacacgcatatcgcgcgtggaagagcgaaaccggaagataatacaggcattgcctgaattcatcttcatctttgatgaaaatttcttcctcaccgacgtgttaatgtcttctgacaccattttgctccatcccgttgaacagctacggggagcggacgggcgcaccatctattctcccgaagtcagcgacctgtttctacgaaatatacgtcaatgcctcgaagacggggagttgaaggagatagagtatcccctggatgtggataattgcgaaaggcattatttccaggcacgcatcgcgccgttcgaagataataaagtgatggcattgatacacgatatcggtgacagggtgcaacgctccaatgaactcatcgaggcgaagcaacgggcagaagaggccgaccgcatgaaatcggtgttcctggccaatatgagccacgagatccgcactcctttgaatgctatcgtgggattctctgaaatcatagctttgacggaagatgaagtggagaaagccgaatacctgaacatcatccagaagaatagcaacctgttgttgcaactcataaatgacattctggacctttcccgcatcgagtcggggaaatcggaaatgaacttccagttggtcgaaatgaccggactgattgacgaagtggagaaagtgcatcgcctgaaaatgaaaacgggcatccgactgaatgtgatgcgtcccgatgaggaaatctggattatggtggaccggaacaggattacgcaagtgctgttcaacttcctctccaatgccattaagaatacccatgaaggggccatcaccctggggctggaggtctgcggagaatggttgaaggtttatgtaacggataccggttgtggtattgcgaaggagaaattgcccttgattttcaaccgttttgaaaagctgaacgattttgttcagggcacgggtctggggcttcccatctgccagagcatcgtggagagattgggaggaaagatttccgtagagtccgaagtaggagtggggagcactttcgtgatgacccttccttaccgccagtttgtgttgggagcggatggtgaacctgttgaaatcaatgcccacgtagagcgaagatcagacggcaggaagaaaattctgatagccgaagatacggagtctaactttatgcagataaacattttgctgaagaaggactacaccatttcgtgggttaccaatggcgaagaggccgtaaatagtttcttgcgcgagcgtcccgacctgatattgatggacatccgcatgccggtgatgaacggtattcaggctacggaaaagatacgtaccgtggacatcgatctgcctatcgttgcggtgacggccaatgctttcttgatagaacaacaacaagcattagccgccggatgcaatgatattattgccaaaccatatacttacgaaagattgaaggaaacaatcatcaagtatatttgagtgggtgtttcttagattctgtccagtacggtttttatcaaagtgtcaatcgtattcttgtagcccgtattggcttctttaatcaaccggttggctatgaccatgcataccgtggtcgccttatgtcccatcaggcgactcaaaccggccagtgcggagctttccatctcgaagttcgtaatgcgatagccattgtattcaaagttctcgattttttcattctgcttcgggtcggccagcggaatgcgtagttcgcgtccttgcgggccaaagaaaccaccggcggcaatcgttacaccgcgtaccatatcgtctccggcaatgcgctctatcagttcggcattggcgtcgatcacgtacggagcaggtgcgcacatattccctgaccatcccatgtggttcaggaatgcacgttcgaatggcaggtcgcacacttcattgcgccctgaatagaagttcagcaggccatcgaaaccaatggacttttgcgagcaaataaatgtacctacgggcgtattcggttgcaaaccgccacaagtaccgatgcgtaccagttctaactggcgaagttggggcttttcttcacgtgtgttgaagtcgatgttggccaaggcgtccagttcgttcatcacaatatcgatgttgtcgcaaccaatacccgtagaaaccaccgtgatgcgtttgcccttgtaagtacctgtaatggttttgaactcgcggctttccacttcacattctttattctcgaggtgtgagcctaccagtgccactctgcccgggtcgcccaccaggattactttgtctgccagccactcaggctttacgtgcagatgaaaaactgaaccgtcatcattgataataagttcggaagatgcaaaatactttttcatattctggattttttggttgatacgtttataaatagaaaacgccggaacgggattactgttcaccggttccgacgtttttctggggcaataatattctaccggttatttactcaacggctggtttgagttgtttcccgatggtttggctatggtttcgcgcatggaagtatcagcttcgatgttcttcatccgataataatccatgatgcccaggttgccgttacggaatgcttctgccatggccttaggtacttcggcttccgcctcgatcaccttggcgcgtgcttcctgagctttcgccttcatttcctgttcgctggccacggccattgcacggcgttcctcagctttggcctgggcgatattcttgtcggcatttgcctggtctatctgcaaagccgcaccgatgttcttacctatatcgatatcagcgatatcaatggacaggatttcgaaagccgtaccggcatccagacctttacggagcacaagtttggagattgaatctgggttttccaatactgacttgtggttttcggacgaaccgatggaagatacgataccttcgcctacacgggccaggatagtgtcttcaccggcaccacccaccaactggcggatattggcgcgtaccgttacacgggctttggctatcaactggataccatcttttgctacggcggtcaccggaggagtatcgatcaccttcgggtttaccgacatctgaacggcttcgaacacatcacgtccggcaaggtcgattgcggtagccatctggaaggataattcaatattagctttagaggcggataccaaggcgtgcaccactctttctacgtgtccaccggccaggtagtgagcttccagctcgtcgcgggtaatgttgctcaatccggctttgtgtgcttcaatcatacccggtacaatgatgtagggaggtacgttacggatacgcattaaaaacaattgcaccaatgaaatcctgactcccgaaactttggcggacaaccataggaagaaaggaacatagtggaagaacagtacgatgaagataatgcctcctatcacaagaaaggcagttaggtacatagtgtctacgttcatgatttataagatattaagtgtgaatattagtcttttttcttttctaccatgataacgccgtccgcaatacggtttacaatgataggggttttttcattcagaaatccgtccatggatttcacttccacgatgttgccgtctatttcggcattgccgatcagtgccaggcgtgtaatggccacacccgtatcgcctacttttacttgatccgcggccgtacggtccaccttcgatgtgatattctttttcaacgccactttatccaaggtcttggagcgcatgaagagtatcaatgagcctatgcaggctattgccgatacaccgagcgtgatgaaaccagccgttgtacccagataggcaaaggcatagtagttggcatagatcatgcaagctccggccagaattccggctatgctgatgcccgggatgacgaacagttctaccaagaataggataaccgccgcaacaatgagtacaatgatgataagtatgtccatagttttctatttaaaggattgtttttctgtattacgcacttcaatggcggccttctccaattcacctgataatcgttgtatctgtttttccaggtcgagtatggcgggagccagtttggctttatcgctttccttggcacgggagtacaaggaacgttgctcttccaatttgttttgctgctgtctgaagcttttctccaattggcggtatttgctgaataagctcttggcctgaggagatttgaaatcactccattgataatacgtagtgtggtcatcaattacaaattcaaagtcatagctccgttcggcttgtggcttttcactgatagcggcttgcaggcggcgtttggcatcagatactgtattttgatctacccatgtatctttcagggagtgaatttgagcaagtcggacaacttttttcttgtccatagcttcgtagttatacacccgtttggaagagttgggaataaatacgtaaatacatactttcccttccggttggtagcgatcggaagcaaaccatccgaggttgttaaactcgtcgatggcaaacatatagtcgttataaggagaattgaatggcatgcccacattctccggagtcagataagtattggtattcgtattgtagcgggtaacaaatatgtcatatccacctattgaattctcaccgtcagcggcatagtagatagttgcaccatccgttaatacgtacggataattggcgttgatggagtcgttgatgctaccgggcaataggctgcctttactccattcgccttgcatcttgttgcgggcaaggatgctgagtttgccatcaggctggcgttcaccgtaataaatcttattaccgagttcagtttcgtatacagtagcttctacttcttctttattctggaagaaatcgttgtacgtgaataatttaccggattctggactgattttataagcttccaaaaagcggtctttatccactacgatactatcgataatgcacacttcttcaatacctttcagcatgcggagattggtcttgctcttttccagaagtttttcagcttctgcggtagacctttttcgtttggaaagatcactgatatactcttcgtaacacttgatggcatcttcaaaacgatacaggtcgttataatttcgtgccagatacagttgtccgctggggatacgtttcttaacggctgtttccaggtatttcagggctacgtcaggttctcctgtttccaagcagcatacaccgtaccataaattataatttccgtttgccggttgtgtcctgacgaattttttgaaaacgggtttggctttctcgtactgccccttgttgtaaaaagctttagcttgttccaacgtctgtgccgatgcaccgactaatacgagactaaatagaaggagtaaaatatatctctttttcatgctagttatccaacttacaaattcgaatgttcaaaaatacaaattaatcgggaataatgctgctttccgttattctattatgttaattcttctttaaatcattcttttctcttacttttgcaggacaaagagtaaaagagctataagctacatgagctacgagctacaagtagttgcgtaacgtccgcatgggacttgtagctcttagcttgtaactcgtagctttgaattattatggcgcaatttactgaagaagagaagaccatccgccgcatagaaaagcggtttagtaagggactggtagaatatgggctgatagaggatggggataaaatcctcatcgggctttccggtggcaaagactctttggcgttggtggaattgttggcaaagcgcgcccgtgtctttaagcccagattctccgtggttgccgttcatgtggttatgaagaatataccttatcagagtgatttagcatatctgcgtgagtatgttgagtcgtggaatatccctttcgtactgtatgagacggagttcgatgcaagtacggatacgcgtaagtcaccttgttttctttgttcatggaatcggcgtaaagcgttgtttactgttgccaaggaacaaggttgtaataaaatagcattgggacatcacatggatgatattctggaaacattattgatgaatatcacttttcagggcgcgtttagttccatgcctcctcgtttggtaatgaagaagttcgatatgacggttatccgtccgatgtgtttggtacatgagtctgatttgctggaactggcacagataaggggatatcggaaacaggtgaagaattgcccttatgaagcgcaatctcatcgaagcaatatgaaagacattttgcatcaactggaagaaatgaatccggaagctcgttatagtctttggggaagtatggcaaatgttcaggaagagcttcttcctaaaaaagttagtaatttagattaattaattatcgcttaaatattcataactgaaatgaaaggtctttatacgattttgcttttaattgtctccaatgtctttatgacttttgcttggtatggtcatctgaagttgcaagacatgaaaattattacaaactggccgctttatgccatcattttgttttcgtggagcatcgctcttgcggaatatttctgcctggttccggccaaccgtattgggtttataggcaatggcggtcctttttcattgatacagttgaagataattcaggaggtgattactcttattattttcactgtatttactactgtcctttttaaaggtgaaagcctgcactggaatcattttgcggcattcatttgcctggtattggcagtgtattttgtattctataaatgataatttagcggcgagggaatgggtacgcggactacgcggataaggcggacgaacgcggactttaatctttcagacacggatgacacggatgacgcggatttttaaagctgcgctatacataccggcatatcacaccgaaggaaaaaagaatccgcgtcatccgtgtcatccgtgtctgaaagattacttgcacgccgaaggagaaccttgctccagcgctacgctggtaaattatcatttttttgttataaaccgttccattcctttcgtatagtacgtttgaagttctccattcccatccgtataaatgaagcacgcatcaatatccggatgagcattggcaaaacgttccgcttcttccaatcccattaccatgaatgcggtggcataagcatcagcgctcatacagtctttggctactacagtggcagataagatattgtgttgtacggggtatcctgttcttgggtctatggtatgtgcatatttctttccgtctctgtaatagaagttgcgataattgcctgaagttgcaatgcctacatccgttacattcagtactgtttgtagctcctgattaatggacagtgaatcatcaaccggcttattgattccaatgcgccatagttctttcttgggattttctccccgtgctacgatctctccgcctatatctaccatgaaattcgtgatgcctttcttcgcaagaaactgtgctattacatccactgcatatcccttggctactgcactacatgagagcatcatgcgctcatcctgtttcactactttgccttcttctgacagaactactttcgtatatcctgtaatttccagcaggctgtctatcatagcggagtcaggaaatgcgcctttcttgaaaccaaacccccaggcattggccagtggagcaaccgtaatatcgaatgcaccattcgtttctttggatatttccatactacgacggaatacatttgtaaagaaggtatctggtacaatatcctcattccggttgattcgtgtaattgtggccgtatcattgaagggagatagcgaaccgtcaaatctcttcaattcttcatcgatttcagctttcagatcatcgtcatattgataagttatattataaactgtgccgaatatcagtccgttgactgtataataaggttgcgtacggttatgacgtgcaagtatccagattgttcccaatacaagcagggcaatccataagaaatttctctgtactttcttttccataagcgaagtttaactgaagaacaaatgttctattaatatttttgtgccgatgataatcaggataatacctccccagagttctgcccgcaactttcgtgcaatgccgcaaccaaaacggataccgaacagtaatccgatgagggacataacgaaagatacgaaaccgatgatagaaatgggtgccagtatttccgagaaatcccgcatccccagaaatgcaaatgagacaccaatggccagtgcatctatactggttgcaacggctaatgcgagtactactttcagacttttcgggtcatactcttttttgcaatcttcgtctttgaaagactctctgaccatgcgtccgcccaggaaagcaaggatgatgaacgcaatccaatgatccagactttctattaggtggctgaacgtgctggcacctatccatccgaggagtggcatgatagcttggaataatccaaagaaaaaagccatggtcagcatgggccgccacagcgtacgtttcagaagaataccactggctatggaaattgcgaaacagtccatcgcgagtcccacagcaagaagccaaatctctaatccgttcatagtttaatagggtagtttatatgtgattgtataggttacgcccatggtgttagagccatatttgccgaatccgggtacataccacggatcaccgtattctccggttgatgaacttgtacggaatttgaagcgcaatccccagcccatgtagaactgtttccagatatgtgcgcgtatgccaacgcagaattcaaaccattgcattgaacctttcattcctttatggttgaatggtacgcttcctccccagataccatccatttgattggggtttccgatacttccgtcaaaaatgggatcagtcacagggagagttgttatatcatacttgaaactactcattgcataacgtaaaccgacaaacaggaaattatcgaatttcttcttataaagagcgttgtagttcataccgatacggaaataaggtgcattacttttgtaattcgttccgttatcattccatgcgtcggtgctgccatatccaagttccactatcgggaagaaacggtttttaaggttgacgtcaacagctacttccgagcttaagaaatcacctcccagaactttgcttccgattccccacaggtctacactgacagtcacgccattgtatagcgggaagacattctcatccgcttctttcttttcctccttcttgggtggattggaagcgggaggccggttgctgttctgtgcctgtaccggaagccctgtcagcaagaaaaatgccagactaaggctgaggataaaagagcttaagattttccgttccataaatgcttacttctttttcttgaatatatatggagtcaagtagatagcgactgtacgctccgcctgtgatgctttgtttcatctgatagccacaatccattgacaggaaatagggcgtattcttttgatagataataatagtgtcttttttaatcttgggatctttgctatagtgaaatatcaatacggtagaatctgctgtatagcgcagaggcaatgatagcgaatgtactcttttctgattgttaagaatgacggagtccgtatcgaaagctgtaatagtcagtgagtcgagtgtatcgttgagcactcttttactttccctgtccaccgtatatagataacattccatcatcggacgtgcattcatggagcaatcttcttcttccgaacaagaagaaacgatactgatgatgggataagcaatcagacaaagcaatatcagttttactaattttttcatagtctatattgttttttctatttgatatttatttcgttcaggagcgttacgcgaaatcagttcgccaaggaagcctgcaaggaacagttgagttccgatgatcatggcggtcagcgacaagtagaagtagggagagtccgtaaccaggcggtaaggcattccgttatacatattatacagtttcgtgattcctacaataatcactgaaataaagccgaagatgaacatcagtgaaccgagcaatccgaaaaaatgcatgggttttactccgaaggctgacaagaaccagagtgaaatcaaatccagatatccattgaagaaacggtttaaaccgccgaactttgtctttccgaatttacgtgcctggtgctgaactactttttctccgatctttttgaaaccggcatttttggcgaggtaggggatatagcggtgcatttctccgtacacttcgatgttcttcaccacatccattttgtaggctttcaatccacagttaaagtcgtgcaggttcttgatgcccgacactttacgagctgttgcattgaatatttttgtaggaatggtttttgaaagtgggtcgtagcgtttctttttccatccggataccagatcatagccgtcttccgtaatcatgcggtacagttcgggtatttcgtccgggctatcctgcaaatctgcatccatggtgatgactacatctccctgtgccttctcaaagccacagtacaatgccggcgatttgccatagttacggcggaacttgatgccatgcacggtatctgattttcggcttagttcttcgataatttgccaggaacggtcggtacttccgtcatttacgaaaattacttcgtatgaaaaaccattggctttcattacccgttcaatccatgcgtacagttccggaagtgattcttcttcattatataaaggaacgacaactgaaatatccatcttgtgatttatgatttatgaattatgaattagggttgaaatcacatctgcttttttactttatcactcattttaatgattcatctttatcttccgcctatatgctctgccggtgggcgcttcatgacaaacaaggcggtggggatagcaagtaatgatccgtagaatacattctgagacatcagttgcatggtgatatctgttggagatagcgaacgcatcgcacttataatttctttaaactgctctacataggcgtccatccccggtatggtatgactggtcaggctgttcagtaagctttcgtatgtgtttagcacaaacccttgatcaataaaacggaaatatacataatgagctaccgctgtaagcaatgcggcaaacatatacataaatacagtgaaaatccacgcgtgaagaaaactgatggcaccaccgcaaacttggttacggtacattcgtacataataataagccataaaaggcacgcatagagttagtcctgcaaagaggaaaaataggaacggtgtagttaaccctaaaggaaataaaatgaacttcaaaatccaaaatcctcccaggtaagtgccgaataacatggcatatcgttgtaagtaacctttgttctctgtcatctttcattaggaataatggcgcaaaggtataaataatattgtttgtaacccccgtattcttgttaaagttgaaaaaagtttgggcaaagtattgcaggtttaataaaaatgcatacctttgcacccgcaaacgaaaatacgggtaagtcctatacggccagctcccttcgaatcctccagggcttgatcgcagcaaaggtagttggttgtagcggcgcgatatagtaagcttacccacccgcctctttagctcagctggccagagcacgtgatttgtaatctcggggtcgttggttcgaatccgacaagaggctcaaagaaaaggagatatgttctaacaagaatgtatctcttttttatttgttttttacgaaaaaagtaatagctttgctctgtaaaaccggatcaacgtaaaaacctgagggttttcttttttaagcatacaacatcgtcagtctatataaaaagaatgccttatcttttacccctctgaactgagccctgaacgctttgagtttagcattgaatgattccgccgctgcattggttgccctcctttcaaagaaattgataatattcagatagtgggtctgaatggatcgtgccactcttccgaaagcaagaaatccggatttatctacctcatcataccatcttgcaagtctcgtcaaggctacatccttaaacttacactgatgataaatcaggcctaaacgcatggccagataatagcctttcttaatctccggatactctttaaacaggatatcagcccgttctctttgagactgggtccacaaggattctttcttgtaaagaagatagatgcttcttgccagcagctgcttccgcgtgtctccattagagaaaacgggagcgtgatatatcctgccacaggcttttgcataggcaatctgtgtggattcttcatccaaagcctcccagcgtgctttcacacgcatctcctgaacggcttcataagccagtttctgtacgtggaaacggtcggtaacccgtttggcggcaggaaaacagctacgggcaatctgctccatattgggagccatatccaaggttatctcacgtacttgatagcgacgacggcgggaaagtctgagtaagacagaacttaccgtacagacatctgtgccttttattatggcgataatactgcctttgccaccatgggcagccttgttggtgagtatggtatagagctcaccacgcgaaagggcaacctcatcaatacagacgtaagcaccgatattcttttcaaaaagcagccaatcctgtgcatgagcaagctgatcccagtgaagataaccactcagatgattgcggtattgacgctccagaagagctccgtcaataccatacagagtgcccaataacttacagctaaccggataactatcaatatagctcttttaaaaaagacgcaaaatcctgcgtcatacgggtaccttcagcgaccatacgccagttgcggctgatgtactcattactcttctttaaaatccagcgacgacgacggatattcaggaaaagtttctttccccgaagagggaagtcttgaacaaccacaggatcatagaatcctttgctttcggtttcttggctggaatattgctcaggaacgacattcttttcttcaagataaataacaacctcactagaggtttcctgcacatctacaagatcaaagtaatctaaagttccttcaggaagcagaaggcgataaccattggaatccatactaaataaatttgaaggcaaagatactaatttagaaatttactcctcagggttttacgttgatccgtaaaacctaatattatgatacgaaaacaaccttataccttctatgtactcttcgtttttctctttctgatcccttttggtaaggcgtttgcaggttggaacaacttcattgtaaactttgataaaagcctttatgggaaaggtccccagacttggcaaatagctccttatgatgaccattgggtgtattttgccaataaaaacggcatggtgcaatttgatggtaatgtgtggaaagtatttccgttaaataacttctcggatgtgcgttccgtattggcatccactattcagaaaagaatctatgccggtggtattaatgaatttggctattacgaaccggcagaagacggcgaactgatttaccactgcatgtccgatacgcttgacaattctgttcgtatgcttggcaatgtgtggggaatccatgaggcggataatatcctttatatacaaggcgatgaccgtgtagtgaaatatctgaatggaaaatataccgctatcgaaatgaatgccaagatcgactgttccaatatggtgaacggtatcctctatataggtaccgatcgtggtgtgtgggtactggtcggaaatactttctttccattgcagggtgcggattccctggcttccaatcgtatccgtggaatcattccacataagggtgggggaatcatcatcgtgacggcgtatgacggtctgttttattataatggccgtaccattgctccttttattaccggtgcagaggactttatgcgtgagaacgaagttttttgtgtggctgctcaagatgataagatagctttgggaactattcataaaggcttattactgatagattgcgctaccatggatgtgaaatacttcaacgagaataacggactgcgtaataatacggtgctttccgtagccttcgacggccagggaaacttgtgggcgggtttggatagtggtattgatcatgtttgtctgagctctccttttaccaatttgtattcatatccttattcttacggtacgggctatgcggcggctgttgagaatggctatttgtatctgggtaccaatcgggggctttattatacttcttatccggtgaagctgaacggtagtttaccggatattcatcccgttcctcaatccagtggtcaggtgtggaacctttgtaaaattggtgatgatctgttttgtcttcatgatcgtggaatttttcagattaaaggtacaagtatacatagaatcacggatattacgggtgcctggtgctgtcaagaggttatggggcgacccgatcgtatgtttgtaggggtgtataatggcatttatcttttggagaagaaagcgggcgaatggcatatgctttgtaaaatcgaaggatttgttgactcaagccgtttgtttgagcaagagtctgccaggattctatgggttcataattccggcattatcacccgtgtggagttgagtgaggatttaacccgtcagatcagtgtaaaatcctatggtgtggcagaaggctttccggttgagcgtgatatttatgtagctaaaatagaaggccgtgtttattttgccacttcccacggtatttataaatataatattcacaaagatatgatggagccttgcaacgatatgaataatttgttgaatggcactgctccctatacgcgtctattggaatatcgtgatcggctcatcagtctgagcccttatgaaatttgtatagctaacctggggacttataagaggggagccaataccagtatcaattccattccccaatctttgcttgagttggtgccgacgtatgccattgttcctttatcggattcgcttatggtgattccgaatgaagagggatttgccctgttcacgattccggcggtgaagcaccggcaagatcttgcccattccgtatatatccggaatatgtatattacctatcctaaagattctttgatatatacagctaattttctaggaaagaagccgtccctcgctattaactatacatccaattcggttcggttcgattatagtctttctttcttggcttttggaggagatgatattcgttttcagtatcgtttgaatgaaggagcatggtcggactataccactgtgcataccaaggaatatagtaatctgtccgaaggtgattatacttttgaagtaaaagccatttatccggacggtactacttcattggatgaactttctttccgtattcttccgccttggtatcgcagtgtgcccgcctatgtcttctatttcgtccttatgttgttgggcgtctggtatatttaccgctgggatgatgtacgtgtgaaacggaagaagcaacaggcagttgtggagaaagataaagaattgcatgaaatggagaaggaatttgaggctgaaaaatcccggcgagagaaacagattatgcagttggagaaagaaaagctggagtacgacttgcagcataaaagccaggagatggctaacctgatgataaactttgtccgtaaaaacgagatgttgacggagatcaaatcggaaattttcaaagtggcttcctctctgaaaggggagggcgcccgtgaaggtaagcagctccttctgattataaatggtaaaattgactctaacatccaaagtgatgaagttctgaaacgcatcgaagatcagtttgatttgattcataacaactttatgaaacgccttcatgcccgtcatcccgatctctcagataatgagcgtatgatgtgtgcctatctgaaaatgaatctttccactaaagagattgctcctttgctgaatatctctgttcgtggcgttgaaactatccgctaccggttgcgcaaaaagtttggtttggaacgtgaggatagtttgacggattatttaaataacaagctgtagagtaatcttctgcttcaagctttttccttaagtttgaacttacggggagaaggtgtacttttcggtattactatgagtcggaaaaagtttcctgtggaggaaccattagtttcaaggcatgaaactaccagtttctcggtgtgaaactactggtttcaagcgatgaaactgtttgtttcacaccgggaaactgattaccacctatggagggccgtactatccctcactcagttgctatttttatgcttttaatttgtactctttcactgccttttccagtctttccaaaggcaattctcccgattgtctccaaagctgttcaccttttctcattaatataaatgtgggatacatttcaatggtgtagaaatcagcaagggcactttcctggtcgatatccacttgcactacttcaagggttccttccattgcctttttaaattcttctacaataggctgcatgcgtttgcaatgcgggcaccagcttgcgtaaaattctgccataacccagtctccattggctaacttttccctgttccgttcttcacgggcttcttttttctcttccatgatggtatgttttaaaatgattgattatacgttgaacaatacgggaagaaaaaaagtttctatcattacaattattaatgctataaaaattgctacttttgtaagcaaaaacacgaaaggacaaataatatgtcacacttggctactttaataaacgatttggcgttgatactgatttgtgcaggaatcatgacgctattgttcaagaaactgaaacagccgttggtgctggggtatgtggtggcaggctttctggccagtccacatatgccatatactccctcggtgatggatacggctaatatacagacttgggcggatatcggtgtaatattccttctgttcgcgctgggactggaatttagtttcaagaaaattgtaaaagttggtggagcggctatcattgctgcctgtaccatcatattctgtatgattcttttgggaataactgtcggtacgggctttggctggcagcgtatggacagcatcttcctgggaggtatgattgccatgtcttccactaccattatttataaagcgttcgatgatttgggaatgcgtaagaagcaattcaccggattggtgcttagcgtgctgatattggaagatattcttgctattgtcttgatggtgatgctgtctaccatggcggtaaggcataattttgaaggttcggaaatgctggaaagtatcggaaaactgctcttcttcctgatactttggtttgtggtcggtatctacctgatacccgaattactgaagcgatgccgcaagttgatgagtgaagaaacactgcttattgtctcccttggactttgtttcggtatggtggttatggcagctcatacgggtttttctgctgcattcggagcttttatcatgggttccattcttgctgaaacggttgaggctgagagtatagaacggttagtgaaaccggtgaaagatctttttggtgccgtattctttgtgtcggtaggtatgatggtggatcctgcaatgattgtggaatatgcacttcctatcattgtaataacactggctgttattctgggacagtccttgttcggtacgttgggtgtgctgttggccgggcagcctttgaagacggctatgcaatgcggtttcagtttaactcagattggtgagtttgcttttattattgcatcgctgggggtatcgctccatgtgacgagtgattttctgtatcctattgtggtggcagtttcggttattaccacctttcttactccctatatgattcgctttgccgagccggcttcaaatttcgttgatactcatttgccggcaaagtggaaaaacttcttgttgcattactcatccggttcacagactatgaatcatgagagcctgtggaagaagtttattttggctttgacgcgaatcactattgtctattccatagtgagcattgcggttgttgcgttagctttccgctttcttgttccattgcttttggaacatatacccggaatctgggggaagctgcttgccgctttcctgactattctgtttattgctccattcttgcgggctattatgataaaaaagaatcattcggctgaatttgtaactttatggaaggatagtcggggaaatcgtgcaccgttggtagctacaatcgttatacgtattctgatagctgtatcttttgtaatgtttgtgatagcaggcttgtttgaagtctctgttggtttattgttgggtgtggctgttttattggttacgatgatgatattgtcccggcaactgaagaaacagtctatcatgatagagcggaaattcttccagaatctgcgctatcgcgatatgcgggccgagtatatgggagagaagaagccggaatatgcaggacgtttgttgtcccgtgacttgcatctggcggatttcgaaatccccggtgaatcggcatgggcgggaaagacattgctggagcttaattttggaaaacaatttggcgtacatgtcgtctctattcttcgaggaaagaagcggattaatataccgggagcttccgtaaggcttttcccggaagataagattcaggtcataggtacagatgaagaactgaaccagtttggtaccgaaatggagaaagcttctgctctggatacgaatgtagttgaaaagagtgaaactatcctgcgtcagttccgcgtggatgagcaatcagaatttctgggtaagacgatgcgtgaatccggtattcgtgagaagtatcattgccttatagtaggggtggagaggggagaagaagccttgcatgctcccgatccgcatgagccgtttatggaggacgatgtggtatgggtagtgggagaaaaagccgatgtgtataaattagtcggccaaaagaatgaaaatatcgacatggaataaagatggaaagtttatctttgttccgtaaacataaataataaaccaagaatatcatgaaaagtgatccgaaagaatgtctgtattgtcagaataacgagacgctgcacaatctgatgattgagtttgccgaactgagtgtatcccgtgtgtttttgtttaaggaacaaacatacagaggacgttgccttgtgtcttacaaagaccacgtcaatgatttgaatgaattgagcgatgaggatcgtaatgcttttatggaggatgtggcgcgtgtaactcgtgctatgcagaaagcgtttaatcccgaaaagattaattatggtgcatattccgataagttgtcgcatctgcattttcatcttgctcccaaatatgtagatggtcctgattacggtggtactttccagatgaacccgggaaaagtatacttaacggatgctgaatacaaagaattgattgaggctgtgaagaaagagctttgataagttgagagttgagaattgagagttgagagttaggctgcgctacagaccgcatggcaactctcaactctcaattctcaactctcaacttattaaagtttattcagtattttgtccattgcccaattagtgagcgttgcgcttgctccgtcgcaagtgcagatggatttgcctaaaaggtggtcgacaacggcttggataagcggttgttgtacatgttccggattagctaccgggatttcttctcttcctttttctgtgtgaagggcgataggatcgtaagtaaatacagagaaacagatcattcctttgtctcctatcacttcaatgcggtcttcgcgtgcggagtcgtgcgctacgaaacaccaagaaccactacctaccaatccgttgtcaaattggaagcatgcactcagagtgtcttcggcaggataaagcccaccgcgattactcttatatccacaggcttcgaggatgcaaccgaacatgttttgtaataagtcaatctgatgtggggctaaatcataaaaatagccgccgccggcaatatccggttgtacacgccacgggagattttctttgttgtaatctaagtcacggggaggttgggcaaaacgaatttgaacattgatgacattgcctatgcttccattctctatcaattcttttactttgaggaagtaaggcagatagcgacggtaataagcaacgaagcagggaaccccggtttcattggagatacggttgatgcggcagcactcttcgtaggttacggccatgggcttttctatatatacaggcttgccggctttcattgccatgatagcataagtggcgtgtgaagagggaggggtggcaatgtagatagcattcacatcttcatcgtcaatcaattcctgggcatcatcataccacttgggaatacctctttccttagcataagctttggctttggcgccatcgcgactcatgacagcaattacttccgaaccttccaccttttggaaggcgggaccacttttatatttggtcacttctccgcaaccaatgaatccccatttaatcttcttttcgctcataatgatgtaatgtgattatcactcttttttattcttcctcaaaatcgaattcaaaatcaaagtcgtccatgaattcgggagttgtaaactcttccaaagttcgtcgatccttttttgtaggacgacctgcacctttggcacggtcaatgaaaccactgatacggctcatctccagcagttcatactgatcgggagtcgtaacgttctccatcatttccgtaacgagctttgcaccaatacgtttctcgatagcttgcaatactttgaaagagtaggtcacaggtggtttgcgcacttgtatcacgtcgcctggtttcaccgtacgggcagcttttgctaatcctccattgatactgatgcgtcctttcttacatgcttcggcggcaatggtacgtgtcttgaaaatacgtacagcccacatccatttatctattcttgcttcactcatatcattttttagtagttagtaggaagtagttaactactatctacttcttattaaattggttcattgtaatatcaattcctgccaggcagaagcttttgataatatctcctgcagtctttaagcgttcgtccatggtcttccagtcttcgtcagtgaagtgacccagaacataatctatctgaccacctcgtgggaactcgttgccgataccgaaacggagccgggcatagttctgtgtgcccaggatggctgcaatgtgttttagtccattgtgtccggcgtcgctaccttttcctttcaggcgcagagtaccaaatggcagagcaagatcatctactattactaacacgttttccaatggaatgttctctttctgcatccagtatcgtacggcatttccgctgaggttcatgaatgtagaaggtttcagcagtaaaagctggcgtcctttcacggatagggtagtggtaaagccgtagcggccatcattgaaagtgacccctgcttcttttgccaatgcatccactaccatgaatcctatattatggcgggtttcgtgatagtcaggaccgatatttcctaatccaacaattaagtatttcatttctctgagaaattatattttttcaccacggggttgcgctgaatttcacggagttttttctttaataatacaattctgtgatgctctgtgtaactctgtggtgaataattatagaaacaaggaacgcggattatcacagctttcgcggattaatgaaatctgcgtcttctgcgttaatccgcgttccggaatgtgtcttcttgtgaaagagctgattagttgccagcagcagcggcagcacctcttgcagcacgagtcaacttaactgcgcatacaacagcttcttttgcattcatcaattgcaaaccttcgaagttcaactcaccaactttaacagtcttacccagacccaggtgagcaacatttactgtcagtttttcaggaataatgttgtataaagcttttacttttagcttacgcatctgcaataccagcttaccaccggcttttacaccttctgctaaaccttccatctgtacaggaacttccattacgatgggtttagactcgtcaatctgatagaagtcaacgtgcaggattgtatcttttaccggatgaaattggatatctttcatgatagcgttgattttcttgccgtcgataatcaggtcaactacgtagatgtgcggagtataaaccaggttacgcagaccatcagcaggcacagtgaagtgaacgttttcacctgctccgtagagtacgcagggtacaccgttgtttttacgaatagctttcaaagctcttgcttgttccgaagaacgttctgcaatagttcttgcagtaccttttacttcaattgatttcatttttttaattttttgtgttactctaaattaagttgttttgttgcttaattcaccatcgcacgatgtgggggtatccacacaatgttgcaaaaaagcggtgcaaaagtacagcttctttttgaattatcaaagagttggctcttcaaaatcaatatcaatcttgatttctccgtccaattccattcctttggtattcatttcagctatagcatccaactctgcctctgcattttcatctgcttctgcattcatatcgcttataacttccaacatttctttccggttaatgaaatcaatagcttcgttcaggccgttcatgaatttctcaaaatcttctctatataagaaaatcttatgtttttcaaaacttacctgcaaatcttcgccttcaccggtcactaccttcttactttcagtaatggccaggaacatttcatcttttctgttcttctttacatccagatagtagattcgtttacctgctttaatggatttggagaatacaatctccttatcgttcatgtccgcaccgtttttcttctttaagtcttccatattttaggtttcttgttgtaattggcttcaaaaatgacgattttttttaaactgtcaaaagaaaaagcccggataatgaatatctgcattaaaaaatgtgatttatttgcgtaaactcattaaaaatgtctacttttgcatctcgttaacaacagtattgattaatagatttatgattaacagagttcttattcgtcttaagattatacagattgtatatgcttattatcagaatggcagtaaaaatttagactcagcggagaaagaattattctttagtctttcaaaagcgtatgacctttataattatttgctgatgctgatggtggctctgacgacgtacgcacaaaaacgcattgatgcggcaaagtccaagttagctccgaccgcagaggagttgtatcccaacatgaaattcgtagaaaacaagttcgtttcacaactggaagtgaataagcagttgatggagtttgctgccaaccagaaacgttcgtggacaaatgacgaagactttatcaagggtttgtatgacaagattatagtttctgatatatataaggaatatatggcttcgtctgataaatcttatgaagttgaccgtgaactatggagaaagctctataaggcatttgttttcaataacgaagagttggatgttttgctggaagatcagagcctttattggaatgatgacaaagaaatagtagacactttcgtgctgaagacgattaaacgttttgaggcaaaaaatggtgctaaccagactttgttgccggaatttaaggatgaggaagaccaggagtttgcccgtcgcttgttccgtcgcgctatattgaattgtgactattaccgtcatctgatcagtgaaaatacacgcaactgggatttggatcgtgtagcctttatggatgtgataataatgcaatgtgcattggcggaaattctaagttttccgaacattccggtaagtgtttcgttaaatgagtatgttgagatcgctaaagtctatagtacgataaagagcggaagcttcgtaaacggtacattggacggaatagttaatcaattaaaaaaagaaggtaagttagcgaaaaactgatacctttgttgagtattaaaaactaaaaacgaatattttatgaatttaatgaccgtattcttgcaagctcctgccgcagcccctggtggtggtagcatgatgtggattcttctgattgctatgtttgctatcatgtattttttcatgattcgtccgcaaaacaaaaagcagaaagaaattgcaaacttccgtaaatcacttcaagtaaaccaaaaggtgattactgccggtggtattcatggtgtgattaaagaaattaatgacaatgatatagtacttgaaatcgcttctaatgttaagattagaatagataaaaattctatatttgcggctgctgctgatgctaacagtaatcaggctgctaaataattttgaataagtgagcctatgattgatcgtaggaacataaaacgcatatatttaaaaacagcgagaaaagttaaggactttctgctcagtgataagagcagagagttcttaatttttttattcttcttttttatagccagtggtttctggctacttcagacgctgaacaacgattatgaaacggaattctccattccggtacgtttgaagggagtgcccaataatgtggttataacttccgaaccaccttctgaattgcatatccgggtgaaagacaagggcacggtgctgctcaactacatgcttggaaagagcttttttcctattactctggatttttctgattataaagggactgataatcatgtacgtatctactcttcacagtttgagaagaggttgcttaatcagttgaatgtatctacaaaactgctttctgtaaaacctgatactttggagtatatttattctacaggtgcttccaaactggttccggtaaagttccagggcacggtgagtgcagggcggcaatattatatatccgatacggtttgcaagcctgattctgtgttggcttatgcgccggagggagcattggataccataacagttgcttatacgcaaaaagtgaaattcgaggatatttccgatacattgaggcaacaggttcctctgttggctccaagaggaattaagtttgtgcccgcttcggtagaaatggtttttccggtagatatttatactgagaaaacggtggaagttcccttgcggggagttaactttccggcaggaaaagtgctgcgtgcgtttccttcgaaagtcagtgtcacctttcaggttggtttaagccgtttcaataagataacggaaagtgatttccatatcaatgtttcttatgaagaactcttgaaactgggttcggataagaagtacacagtaaaactgaagtcagtacccaaaggagttaatcagatacgtatcaatccggaacaggtcgactttcttatcgagcaagtatcctttgaatatggcgattaaaataggaataaccggtggtattggtagtgggaaaagccttgtttcccgtttgttggaagtaatggggattcctgtttatatctcagatattgagtcgaagcggttgacgaattcggatgctttgatccgtcgtgaattgattgctttgctgggtgaagaggtgtatgccggtgatgaactaaacaaacctttgcttgcttcctatatttttggagatcctgagcatatccgtacagtaaacagtattatccatccgcgggtacgggacgatttccgtcagtgggtagagcgtcatactacctatccggtagtaggcatggagtctgcaattctgatcgaagcaggatttgcaggcgaagtagatgctgtggttctggtttatgcgcccgaagaacttcgcatcatgcgtgccatgcagcgtgacaccgctcctcgcgaattgatagaacgccgtgttcgtagccagatgagtgatgaagagaagcgtactcaggctgattttgtaattgtaaacgacggtaaaactccgttaattccgcaggttttagaggtaataacttctctatctaaaaatattgcttacctttgcttaagcgaaaataggctgcaccttggtaaaaacaaataaatttgcttttactctcggtttgcactatctttgcccaccgaaaaaataaaatattactaataaaaaatagaacatactatgttgaagactattttgtctatttccggtaaaccgggattgtataaactcatttcacaaggtagaaatatgttgatcgtagagtctctcacggacaagaaacgcttccccgcttatggtaacgagaaaataatctctttgggtgatattgccatgtatacggatacggacgacgtacctttgaaggatgtgttgactgctatgaaagagaaagaaaacggtgctgccgtagtaatggatttaaagaaagctactgctgatgaacttcgtgcttatctgggtgaagttttgccgacttttgatcgcgatcgtgtatatctggctgatatcaaaaagcttatttcctggtacaatctgttagttgcttgtggaataactgattttgaagatacagcggaagcggaaactacagaagaaggaaagacggaagaataaatttgaaataaactgttcttttaacagaaaaggcggattatcaggggcatcccggataatccgcttttttttatgcggtatctttaattttgattactttttttatacctttgttgccatcctgagatgcagagtgggcggtggcctctctcacaaagattgagggataattatggataaaagcgtttaatattatcttgtacttgaaatctggacaatttcatgctattcaaggatgatagacaacaaacgctcatgctctgttgtatatgcatattcaaatgtatagtacggagcgtgggctgttgtatattatttgaatagtggcagtccagagccccaggtacagtaataacagcagttcccacgctttttttatatgaatttattgcctttaagggacttgaggctggcattaattaagatggaagagcataagagcgtaacagtacaggtggataaagccgctggtaagatatatgtggatggagtgttgccaaacgctacgctttgtttatatcatatccgggggaaggtgattgaggtaaaacaggcgagggaagagagcgcttcgtttgatttgccatgttctggagagtatgtgttggttataacacatgcgttgtccgtaccggttgttaagcagctcgttatagaataagaaaaaagctgccttgccttcagtggcaagacagctttttttatttgcggatattttagtttagtttttgaataccagtccttcaccaccggcatctactatgattggtttactgcggtctacttcttgagcgagcagctttttcgacaagtcattcagtaagtaatgttggatggctcgtttcaccggacgggcaccaaattccggatcatatccgacctttgtcaagaactctatagctccatctgtcaatatcagttccacaccattctgggccagcatcttttgtacaccttttatctggagtactacaatctgcttgatttcgctttcattcagtggcaggaacatgattgtctcatcaatacggtttaggaattccgggcgaattgtctttttcaacatattcatcacttccttcttcgtctcttcaatcacttgttctttgttagtaccattcagcttttccatctgactctgaatgtaagcacttcccatgttggacgtcataatgatgatggtgttcttgaagtttaccacacgtcccttattgtctgtcaatcgtccgtcatccaatacttgcagcaagatgttgaatacatccggatgcgccttttctatttcgtcgaatagtacgactgagtatggtttgcggcgaatagcttcagtcaattgtccaccttcatcatagcctacatatcccggaggcgctccaaccaggcgtgacacactatgcttttcttgatattcactcatgtcgatacgtgtcatcatgctttcatcatcaaagaggaattcagcgagtgccttggcaagttccgtcttacccacaccggtggtaccgaggaagataaacgaaccaatcggacgtttcggatcttgcagacctgcacgactacggcgtacggcatcggcaacagcttcaatggcttcatcttgtccgatgacacgctggtgaagttcatcttccagatgtaacagtttatccttttcgctttgcagcatcttactgacggggatgcctgtccaacgggatactacatctgcaatgtcttcggcatctacttcttccttaatcatggctttgtcgccctgcatggcatgaagctccttttgagtatcctcaatctcctgattcaaagcctgcaacttaccgtaacggatttcggcaactttaccgtaatctccctcacgttcagctttgtctgcttcgaatttaaggttttctatttcaaccttattttgctggattctgttgaccaatgtcttttcactttgccatttggctttgtacgatttttcctgttctttcagttcggcaagttccttaccgatttgttccagtttcggtttatcgttttcgcgtttgatggcttcgcgctcaatctccagttgtttgatcttacgtgaaatttcatccagttcctccggtacggagtctacttccatacgtaacttggcagcagcttcatccatcaggtcgatagccttatccggcaagaaacgatctgtaatatagcggttgctcagctctacggcagctatgatggcgtcatctttaatccgtacatgatgatgattctcgtaacgctccttcaatccacgcaggatggagatggtgctcaatgtatccggttcgttcacgtatacaatctggaaacggcgttccagtgccttatctttttcgaagtatttctgatactcgtcaagagttgttgcaccgatgcttcttaactcaccgcgcgctaatgcaggtttcagaatattggcagcatccatggcaccttcaccctttccggcaccaaccagcgtgtgaatttcatcaatgaagagaatgatatctccttctgatttctttacctcattgataacggctttcagacgttcttcaaattcacctttatactttgctccggcaaccagcgcacccatatccaatgagtaaacttgcttgttcttcagattttccggcacgtcaccacgcaggatacgatgggcaagtccttccacaatggcagtcttaccggtacccggttcacctattaatataggattgtttttggtacggcgactcaggatttgcaacacacgacggatttcttcatcacggccgatcaccgggtcgagctttccgcttcgggcagcttcattcaggttgatggcatacttttccagtgactgataagtatcctcgctggattgtgaagtaactttttctcctttgcgcagttctgtgatggctcctcggagctcgtgctccgtcattcccgcatctttcaggatggtggcaactgtgctttttacagtcagcaatgccaacagtaaatgttccagtgaaacaaattcgtcacccatctctttggaatactgggtagccttctggaatacttcgttcgtttcacgactcaggtaaggctctccacccgaaactttgggtaatgaatctgtttgtttgtcaaggacgagtgcgatctgctgtccgttcatgcccagtttctggaaaatgaagttagtgacgttttcgcccaccttcatcactccctgcataacatgaaccggttcgatagcctgctgtccacggctcttggccaggttcagcgcttcttgcaccgcctcttgcgatttaatggtaaagttgttaaagttcatatcttatatctcctttctattttcattttcaataacacttgaatgggcgcaaaagatttgccaatagcctgtacctgacaattttacagttaaaagatgaaagataatgccaaaatgtctttattatgccatgctattgatatatatgacgcatcgggcgtatagattccacaatagaatacttaggaacaataagtagaatgggaaggaagtcgtatgaaaaccacgctttgccttattgttttcgttcttttgcccgtagcaaaacttcgtcccacagttgtgggctctacgttttccatatgggggctgtgtagcccgcaattgagagccgaacagccctcagctggaaaataaggttttgcttatagcataatgacattaaccttaaggctttaaggggaaaaggaaggatcatatcaagtttctcctctgtaatatctgctttctatataacgagataatggagtataactccttaattcctaacgaagtgatactccttttacacttgcgatgaataattcaggctaaaaaaggagatatttgcatcaattcggccaaggtttgcataatgcatattaaggacttgtgaattagtgaattacaaacataaaaacgctctttttttctgtttttcggtgtaggatgcaactttcctacaccttcctacacaccttcctacaccacctatctatttgataaccagataaaaataatagcgggtgtaggatgtaggaaatattgatataaactcgataatacgagttttcctttcagcgattatctttttatgaaagagcagtgacgaaattccagagaatcttattttctaagcattactaaaatatactaatgtgtaaattttgagtaaaactagtgcagggctgaaaggaatattgtatctttatccctcaaaaatagaatagaatagattatggcagaaaatgtaaagctcgcagagaatgtgatactggtggacgtagcatactttaatgacgtagttaaagatctgaagagatattttgagttgcagctgggacgtccgttgcagaatatttatgtagaagagtgggcttcttatctggcactcgactccggtgttcgtgataaggataataacatagaagtactttttgtacatgacagtcagaccaataagttgcttcactgcgatccgtctgatttgaataaagatttgaacggggtgggctatacaaatcagttaggtgagtttacatttacttctgtatcttctgaaggattggttccacgggcaaatctctatcttgatctgctgaatatagcacttaactctgccgatgttaaacggcttatgctggttccgtttattgatgattacggtgctaaattaatggaagttttggatgagtatttaagaaatgctgatactgaaaactcaaaaagattgtttcttttcaatatggatgaacctgcgcatccccttggttgcaaatgggatttactgggttactccatgatgcgtgcattgggcatcaaggccgaagaacttgaataatacctgttacttatcactaatcgctaacctttaatcactaactcccgtgtccgattttcgtttaaaagtatttcagtctgtagcgaagaacctgagtttcacgaaagcttcgcaagagttgtttgtcagtcagcctgccataacaaagcatatacaagagttggaaagcacttatcaggcgcgtttgtttgacaggcaaggtagcaagattagtttgaccgaagcgggaaagttacttttggaacattgtggccgtattctggaagattataagcgattggaatatgagatgcatttgctgcataatgaatataccggagaattgcgtctgggtgccagtactaccattgcccaatatgttttacctccattgcttgccagcttcatcaaaaagtttccgcaagtaaatctttcattgatgaacggcaattcacgtgagatagaagcggctttgcaggaacaccgcatagatcttgggttagtggaaggtgttttctggttaccaaatttgaaatatactacttttttggaggatgaactggtggctgtgacacgtacgggaagtaaactacaggtaggtgaagaaattactcccgaagagttgcttcatattcctttagtgcttcgtgaaagaggatcgggcaccttggatgtctttgagaaggcattgcaacagcataatataaagttatcgtctcttcaggtattaatgtatctgggtagtacggaaagtatcaaacttttcctggaacatactgactgcatggggatcgtttccattcgttctatcacccgtgaactctatgccggacaactgcgtgttattgagataaaagacatggttatgcttcgtgattttagttttgcccaacctcagggacaggagagcgggctttcccaggtctttatgcagtttgctgcacatcataaccataagttatagcgtataaacagatacaattggtgtatataggtaaagaagcctacctttgcacccggaaatcagaaataatataaatattgatatacaagaaaaattatggcttcaattcaaacagcgagtgtaaacactctggcgtatcttcaacggaagaacaaaattacttatgtgtctttagtggtgcttttatcaatcttcttattattggattatatcccaggttattctacttgggtgacacctcctgtcgctttgttcctgggattgatttttgctttgtcaagcgggcaggcacatccgaagtttaataagaaagtatccaaatatcttttgcagtattcagtggtgggattgggattcggtatgaatcttcaggcatctttagcctcgggtaaagaaggaatggagttcactgttatttcagtagtgggtactatgcttatcggttggttcatcgggcgtaaattcctgaaggtagaccgtgatacttcttacctcattagttccggtacagctatctgtggtggtagtgctattgcggcggtaggtcctgtgttgcgggcaaaagatacggagatgtctgtagcgctgggtaccatctttattctgaatgctattgcactgtttatctttccggtaattggccatgctttagatatgagtcagcaagaattcggaacatgggcggcaattgctatacacgataccagttcggtagtgggtgccggtgcggcttatggtgaagaagctttgcaaattgctacgaccattaaattgacacgtgccttgtggattattcctttggctttgattacttcttttgtattcaagagtaaagggcagaagataagtatcccctggtttattttcttctttattctggctatggtattcaatacatatgtattaaattcatcggaaaccggtattatgataggagagggaattaacagtctggccagaaagacactgactatcactttgttctttatcggtgcttccctttcacgtgatgtattgaaggcagtgggcatcaaaccacttattcaaggtgtgttgttgtgggttacaattagcgtaagcacgctggcgtatatttattggttctaaagaaaacacttattaatataaggtatgcggcagaagaaaatttcttttgccgcatttttgtataaaattcattttctttgtaacaaacttctgtctctttacgtctaatcaatagatacaaccaataaacaggattgagatacagaaaaagcccatggatgctgaaagttttaaaaatgagtttctgccctaccaccgcaagctgtacagtgtagcctatcggctgcttgagaatgcggtagatgcggaggacctggttcaggaagcctatctgaagctatgggataagcgggaaggattgatggttatcagcaacccggaagcgttcagtgtcactttggtaaagaatatgtgctttgatttgcttcgttcagggaagtatgtcttatccaggcaaactgtggaattgactgctgtgcaggatatttctcaagctgataatctggaggtacgtgacgaggtaaggcaagtaaaagatatcattgcccacttgcccgaacagcagcagcggattgtgaacctgcgtgatgtcaaaggctgttcttacgaagagatagaacaagtgaccgggttgaactctacaaatatccgtgtactgctgtcccgggcgaggaaaagaatacgtgaggaatttaataaatggaataactatgaaagtcgaggaaattgaaaggctgctcgccgagttttatgaggggaacactaccgagagccaggaagaggcgttgagagattatttcagaacaacggaagtgcccgaacatctgcaaaaggataaagaaatttttcttagccttaaccagggtgcagatagagatgtggaagttcctgcgggcttgggggataaactgagccggctgattgatgaaaaggctgaagaagaacagcgtttcttccggcctaacaaatccagacgtaactggcgctggattgggagtgttgcagcaaccatactggtaattataggcatcggatatggtgtggaaaatctgggaaaagatgtatgtccgcccacaccgcaggatacattctctgatccggaagaagcttatcaggttttgcaagccactttgattgaagtttccaccaatctgaatcaaggcattgcccaggtgaaggaaacgcaaatggatatgaaaaaagttaatcaggaagtaaaaaaagaaatgcaaagataaacgattatgaaactcaacaagattttattggcaggtgtgctgctgatgctccccctgctctgccaggcgcagaaaaatatattcaatacgtataatgatatgaaaggggtttcctctgtttatatctcaaaagcgatgattgaaatgaaccccaatcttttcacgaaggatatctatattgggaaagtatccggtaagctggaaagcgtacagatcgtttctacaatggataataatatcaagaaggatttgcggaaagatttgcgtacactggtacagtcgtccaaatatgagctgttgatgaaacagaaggggaatgtctccagttccgaattctatattaataggaaaggggataaggtgaaggaactgattatgattatagacggcgctgctaacttgaggttcgtttatctggaaggagaaatgactttgaaagatattcagaatatcatgatgtatcaaaataccagtatgaatgtgggagggaatgtatatcgtatcgtagacggtactcttgatttggcggatttgggcgttttggacggtttgaaaggattggaaagcttacagggcttagaaggtttgaagagtttggaaagcttgaaaagtctggaaagcctgaaaggattaaagaatttgaaagacttaggtaaactaaaagatagcgaatatttaaagaaacagatggatgccgattcctggaaacgttttgaggagagcatggagatgctggaaaaacgcttggaagacttggaatgaggctgtctgctgataggtgtaaatagtttgttgagaaaggggaaccgattccggttccccttttgttatgagtgaaaatttgattacttgtcttttcttaaagcttcgaaaatcaatccttccaattcttctgccaattccggattgtcagcaataacttgtttggctgcgtcgcggccttgggctatcttggtatcattgtagctaaaccaggaaccactctttttgacgatacccagttcggcacccaagtcaatgatttctccggcacgggaaatgccttctccgaacatgatatcaaattctgctctgcggaaaggaggtgccactttgttctttaccacttttactttagtctgtttacccagcacttcgtcaccattcttgatagcctggcttccgcggatatcaaggcgtacggaagcgtagaatttcagagcgttaccaccagtggttgtttctggattaccgaacattacaccgatcttttcgcgcaactggttgataaagatacatgtggtgcgtgtcttactcacggctgccgtaagtttacgcaatgcctgagacatcagacgtgcctgcaaacctactttattatcccccatgtcgccttcgatttcggcttttggagtcaaagcggcaacagagtccacaacgatgatgtcgattgcagaagaacggatcagctgttctgcaatttccaatgcttgttctccgttatccggttgagaaatcaacaggttgtctacatctacccccagtttggccgcatagaaacggtcgaaggcgtgttcagcatcaataaacgcggcgataccacctgctttttgtgcttcagcaatggcatggatagccagagttgttttaccggaagattccgggccataaatctcgatgatacgtccgcggggatagccgccaacgcccagtgctacgttcagtccgatagagcctgaggggattacttctacttgttcaacgctttcatctcccattttcatgatagaacctttgccgaagctcttttctatcttgtccatagctgcctgtaacgctttcagcttttcgcttgatgccatattgttttcgttttcaaaattaagttcgtctttctttgccatatacttgctgttattagagttgacaagttaataagatatcaattgataatgaactgactttttatctgtttgtcaacttgtcttcttgttgattataatatttgtgcggcgtggtctttggttttcacctccttgggggtgatgattctctctatcactccttcttcattgataatgaaagtggtgcggaaggttcccatatatttacgtccgtacatacttttttctccccaaacaccgaattgctccacgagtttcttatccgtatctgcaatcagcgggaaaggtaagttgtttttctcaataaatttttggtgcgacttttcattatctacgcttacgccaatcacttcgtagccggctttgcgtaattctgaataattatcgcgcaggttgcaggcttgtgccgtacatcctgaagtcatatctttgggatagaaataaagaactatcttctttcctttataatcgctgaggcggatttcttcgcctttttcattgatgcccaatacttcgggcgctttatctccaacttgcataatctataattaaattaaaaatgaagaattatacttccaaatctttatcaaacacttcatgccaaggcaatccctgtttgttcaactgttccatgaacgggtccggattaaactcttccacattccatactcccggtttcttccacaatcctttgaggaacatcatggcacctatcatggcaggaactcctgttgtatagcttacaccctgcatacctgtttccttgtaggcttcctggtggctacaattattgtaaacgtagtaggtgcgttctttaccgtctttcaatccccggatgcggcagccaatggaagtttctccttcataattttcgcccagatcctgcgggttaggcaatacggctttcaggaattgcagcggaacgattttcaccccgttgtaatccacttcatcgatacgagccataccgatgttctggattactcgcaggtgagtcaggtattcctgaccgaaagtcatccagaaacgtgcacgcttgatggtagggaagtttttcaccaaagattccaattcttcgtgatataacagataggaatcacgtggtccgatattcggataagtcaggtccttatggatttccaacggttgggtggttacccattggccattctcatagtaacgtccgttctgcgtgatttcacgaatattgatttccggattgaagttcgttgcaaatgccttatgatgattacctgcgttgcaatctacgatatccagatattgcatttcatcgaaataatgtttggcagcatatgcagtataaataccacttacccccggatcgaagccgcaaccaaggatggcggtcagtccggcatcctcaaaacgtttcttatatgcccattgccagctgtattcaaagtgagccacatctttcggctcatagttggcagtgtccagatagttgactccgcttttaagacaagcttccataatggtaagatcctgatagggaagtgctacgtttatgacgatttcgggtttgaagctattaaagagagcaaccagttcatccacattgtcggcatctacctgtgcggtctggatgttagggttaccgattgcttttacgatagcgtcgcatttggactttgtgcggctggcaatcatgatctcagtgaatacatccggattttgagccaccttgtgcgcaacgacggtacctacaccgcctgcaccgataataagaactttacccatttcttttaataacaaattacgagttacaaattataaattatccttcttttttattggtgagcaaatataggatttaattcgcagataaacattaaaatcctactaaatactttttataaaaagcttctatttctaaacaaactgcttgtatttgggttattttgtatatatttgccccgcgaaaattaacttaaacaacgaataacaatgaagaaagtaatagtttctctttgtatggcaggagctttgatagctctgtcatcttgtcgctcttccaaagatgctgcgacattatcttccatcaatggtgaatggaatattattgaaataaacggcgctgccgtagtgcctgctcccaatcaggaattcccttttatcggttttgatacgaataccggaaaagtattcggtaacagcggttgtaatcgtatgatgggttcgttcgatgtgaacgctaaacccggtacaattgatcttggagctatggcaagtacgcgtatggcttgtccggatatgacgctggaacaaaacgtgttgtctgctttgggacaagtgaagaagtataaaaagttaggtaaggagaacatcgctttgtgcggttcatccaatcgtcctattattgtattacaaaagaaagcttctacagtgaaactatcagatttgagtggtaagtggattatttccgaagccggtggtcagtccattcccgaaggtatggagaaacagccgtttattgagttcaatctttctgaaaagagaatacacggcaatgccggttgtaatcttataaatggcggatttgttgcagacaacgagaacagttctgcaatttctttcccgcaacttatcagcactatgatggcttgtccggatatggaagtagaaggtcgtgtgatgaaagcactgaatgaagtgaagtctttcggtaaactggccggtggtggcatcgggttttatgatgcggataatacactggtgatggtactggtaaagaagtaatccagataattcagaatatagaaaaacaggatgtcaatatcaattggcatcctgtttttttgctttaatgagatactgctttcaaaccgataatcgaacctatcagcgttgcaataaaaaataacctccatatagtggaaggttccttgaaaattagtatgcccgccaatacggttcctaccgcacctattcctgtccatacagcataagccgtaccaataggcagggcttgcgttgcctttatcagcaaaaacatgctgatactcatagaaataatgaaaccggtgaaccaccagtacatttcactgccggttgtttctttaactttgcccatacaggaggtaaacgctacttcgaacaatccggccacaatcaaatatatccaactcataacttttattttttgtgtgcaaagttcatgaattggtttgacttcttatttaacaaatgataaaaagtgatttatctgaattttgcccgaatacggcttaaactgacctgtgtaataccaagataggaagcgatatagcctaattgtactctttgcaaaagatccggagtatgattcatcaggtctctataacgttccagggatgtcttgaactgtcggccgataaacctttcttctgttttgagcaattccttttctgcaaattctcttccccagttggcgatgtgtatatccttgcagaataattcatgtaaggctcgtttcctgacttcatatagttcacattcttccagaagttctatattttcatagcctctttggttggacacatagcttttcatggataccaccgtatcgccttcgcgtccgaaccagaatgttatttcgttgtcagctaactcggtataggcacgtacaatgcctttcttgatgaagtatactttggtttctattttgtccgccctgaataggatatgtcctttggggtgagtgacttcagagatgatctccttcagcgcattctttgacggctccggcagcttgcctatattatcgataatctgatctaaatccatgttgagtactgtattatgtatctttcttatggtatttgcacggcattatctctgtactatctccgtagcatttccgtgctatctccgtaccgcctccgtatctgctccgtaccatctccataattataggtataggtttggtacggagtagatacggagcagatacggagctgacagattgtgaagcatagattctgaaaagggaatggatgtattgggatgatttatttccttctcttcagccctgcccgtattctgctcaaagattgtggtgtaatatataaatacgatgctaaatgttttaacggaacatattgcaacagttccggattttcttccatcaaggtcagataacgctctttggcacttggggtaccgtatgccaatgtgtagctatcaataaataaaatttcctgttcaaagatttttcggccgaagttggataactctatagaactattgaatagttcttctaaatccggtttggcaatactataggcaatactttcatttacagattcaatattcacttgtgaaacttcattattgacatatccccaggaggaaaaagctatttctcctgttccggcaaaccagagggaactttcagtaccgtctatcatataataagcacgccagataccctttttcaagatgtagaagttactgttacgttctccttctttcacaatggattcccctttaccgaaatgatattctgtcatgtgtgacaaaagttcatgcaggcttttttccgggagtctgtatctttggcagaatttctttatcatcatttccatgctgcaaagatactatattttttttgtgctttctttttgcttttatataaatagtaagtatgaaaagggtggtcagtagttcagccagaggggttgccaaccagatacccggattaccaaagagtaggggaagtccgaagaagcacgctgtcagcaggacgaaaccacgcaacagggtaatgatagtggcataacgagcctgctccacactttgaaaatatccgatggaaacgatattgacagcgaagaaaataaagccggtggcatatagaggaagtcctttgctggctatttcataggccggataactgcggtcgatgaacatggaaacaatctccgaactgaagaagatggtgaccagagcgaagacagtaccacagccgatggctgttttcagtgccaataaataggcacgacgtacgcgggtttcttcatgaagtccgtgattgtaactgataatgggttgagcggattgtgcaatggcgttgtacaccataaatataatagggaagaagtaacatgcaatgctgaatgcagctacaccttcttcttgtaaataatgtataaacacgatgtttccgacaaacatcatgcaggcaatagctacttcacacagaaaagcagaagaccctagccggcacatataacctatattacgacgcgtcagttgcatgcttttgcgagtgaattttacggggtaaaagcgtaaagcgcatttgcggcgggagaggtagatgattatcatcaatgctcccaccgtagtaccgatggcactggcaatagctgcaccgaacatgccccaaccgaaaggaaagatgaacaggtaatcgagaatgatattcaggacggcagctactatattgcacatcatggcaaagttaggtgacccgtccaggcgcaggaagaacatccctgagttaagcagggcggtaaacaccgagaacggaacaaaccataccatatactctacagccagtggagtcaaacgctcggaaccgcccaaaagatgtactacctgtggggcgaacgaacagaatagcgtggaggtacctatcaacaacaatgaagatacaactatagactgagtaatattgatgcgggcagcttttacttttccatgtgacaagtggatggaggctacaacagatgctcctacaccaaacatcagtccgatgcccgtagagaataaccataatggcgccactatatttactgctgcaagtgcatcactgccaataccttttcctacgaatattccatccgtaatgacaaataatgcggaaaatatcattcccagtacagtagggagtaataatttgcggaacaatgccgcgatgtctgtgtttttaaaatcaatgctatctctttccataattatatttagttacgagctacaagctacgagttacgagtggctgcgctatgatgccgaaaggtactcgtagcttgtagcctgtagctcgtagcttgtactctactgctttttcgtcggcaaaattactgcttttatgtgggaggacgattaacaaatggtaattttcgacagaaaaacaaagaagaattctgccaaactgacagcctttctgccaacctataaaattacaacctccctgaacattttggcacgacgtttgtctttttattggcgtctgctgctgatgcaggcgaccgaaacttgaataataacaaataaaatattaaagatcatgggaaaaattattggtattgacttaggaactacaaactcttgcgttgctgtatttgaaggtaacgaacctgtagtaattgcaaacagtgaaggaaaacgcactactccgtctatcgtagcattcgttgacggcggtgagcgtaaagtgggtgaccctgcaaaacgtcaggctatcacgaacccgacaagaaccgtatcttcaatcaaacgtttcatgggtgaaacttgggatcaggtacagaaagaagttgcccgtatgccatataaggttgtaaagggtgataacaacatgccgcgtgtagatatcgacggacgtctgtatactccgcaggaaatttcagctatgattcttcagaaaatgaagaagactgctgaggactatttgggacaagaaattacggaagcagttattactgttccggcttacttctccgattctcaacgtcaggctacaaaagaagccggtcagattgccggtctggaagtgaaacgtatcgtaaacgaaccgacagctgctgctttggcttacggtatcgataaagcgaacaaagatatgaaggttgccgtattcgaccttggtggtggtacattcgatatctctatcctggaattcggtggcggtgtattcgaagtattgtcaacaaacggtgatactcacctgggtggtgatgacttcgaccaggtaatcatcacttggttggtagatgaattcaagaatgatgaaggcgctgacctgactcaggatccgatggctatgcaacgtctgaaggaagctgctgaaaaagctaagattgaattgtcttcttctacaagtactgaaatcaacttgccgtacattatgccggtaggtggtgtgcctaagcacttggtgaagactttgactcgtgctaagttcgaagctctggctcacactttgattcaggcttgtctggaaccgtgtaagaaggctatgtctgatgctggtttgaacaatgctgatattgatgaggtaatccttgtaggtggttcttcacgtataccggccgtacagaaactggttgaagatttcttcggtaaagctccttctaaaggtgtgaatccggatgaagtagtagctgtaggtgctgccgtacaaggtgctgtgttgacggatgaaatcaagggtgtggtattgctggatgttactccgctgtctatgggtatcgaaactctgggtggtgtaatgacaaagttgattgacgctaacactactattccgtgcaagaagagcgaaacattctctactgctgctgataaccagagtgaagtaacgatccacgtattgcaaggcgagcgtccgatggctgctcagaataagtcaatcggtcagtttaacctgtcaggtattgctccggctcgtcgtggtgttcctcaaattgaggtaacgttcgatattgatgctaacggtatcttgaaggtgtctgctaaggataaggctaccggtaaggaacaggctatccgtatcgaggcgtccagcggtttgagtaaagaagaaattgaaaagatgaaagctgaagctgaagctaatgcagaagctgataagaaagagcgtgaaaagattgacaagctgaatcaggctgactcaatgatcttcacaactgaaaatcagttgaaggaattgggcgacaagttgccggctgataagaaagctccgattgaagctgctttgcagaaactgaaagatgctcataaagcacaggatttggctgctgttgatactgctatggcagaattgaatactgcattccaggctgcaagtgctgaaatgtatgcacaaagtggtgctcaaggtggtgcacaggctggtcctgatatgaatgccggacaagctggcggtgctcaggatagtggtaagcatggtgataatgtgcaggatgcagatttcgaggaagtgaagtaaatagactgtcatattaaaaaaagagtcgtaaatcaatgatttacgactctttttttgctttaggtttcttctagccattgctatagcgtaagcaatgatattcagtcgctgcgtcgaagcaaggacattcttccagccatgattccggttctattaatgaatggttatccataatttgaggtaaatcacgatgcccgcaaatatgacagtccggataatcaataaggagcgttttgagtaaaacaatcatggagtgcttttgccattgagtgcgtgtatctttgggaagtccgtgccggttaagaccaccttcgtaacatatagcgatgctgtcaagattatattcttagtatttatttaaccatcttgttacttagtgtacaaaagtactatctactatacattacataatacgtgggaaaatgtggcaggataaactggttattctttcaataagttatgttctagcaacttggagtgaacgctatcccataactccttttgcttctcattcaacatatctacagatatgaacgtagtaccacaaaacacaatatcgctatatcttattactggtattagtccgaatttagtccaagcaaaataattatcgttatatttatctgatatgccagtgttacatagatacatttcttcattgatattaataagcgtctgtatggagtgttccagtatatcaaacatccgacctcttaaatcatactttataccatccgctactactcttttgcggaatctggatagcaaatgctgcgacaaaataaaggcattattcaaattgatataaacaaagtcggtagtattattacctcttctcatatatcctactatgaagaattggttagtactcttatagaatacaaagaagtaatatcctcgtatggcagtaactttcatacgccattcatcactactagtaccatctaggctagtaatgaaatctatcatttcttggctatatgccagattaaataaattctctgcgtgttccgctatattcatacctcacaaattaaaaaaggctaccaccgaagtagtagcccccaaacttttgtcagcttttaatctctgccatgacttgttctctcaactctggagatacatttttcaatgtttctgttatcttagacaggttcaattgcaggtctatatcactgggatttagttctacaacttgctccagaaagctaacatatcccttgtaagcatccaaacgcagtttggctttttttacaagttcctgcccagaggctttagaagaaagccagccgccaaatttatcaacttgcgtagcgcggtcagagttaatcacttgcacaaaaacctgtgcatttacagtctcaatcttagaattattcataataataaaaaattaaattcggcaaaattaccgctaaagtaaatgcctctgtaaatgcactgcaaaggtatgtaatatatccgtaatatgaaaaacttcttaaaatattttttcaataagcacttcatatatcccatccagaactacaaacatcttataaatcagtctatctagtactattggcgaaaatacaagtgagaaactactagtaacacctttactactaactaatgtacaccgcagtcgtatcactattagctataccatttatttaactaatgtactagttccgcaaataacggttaaattagatataactgccattactaatactaccatcatttgtttaatgaatggcgcacaaaaaatcggcaggataattaacagcttctatcaccactgttttttatctactaaccaagttatatagcatctacttcgatatatccgctattcgctaatatacaatcatttaactatctattccgaatatcggctatccgtcaatagccataaatataaactattgacaaaagaagtgcataaagtcactattcttgtctgttagcttgctgacagaagaaaataacggcaatatggcgatatagacaagctatctatagaaagtgttcctttgattaggtacaccgtccagaaatgagtataatcgtatagagataaaaagataaagagttaccacgagcaggggtatatccagaactgcctagagtaattcaagcactatagattttacagtatataatgaaactaacctaaaacaattcaattatggagtattacacgtttgaacaattaaaggaaatggcttttagtgatggaattactggtaataaggtagctgtcggtatatgggctaaaatgaacggctttctaaagaaaaagaagcagataaacaagcgtagaattacattctactttaaactggataattggcagtctcgtaatttatgactaccggagcctctctataaagcagtatcaagaactgcatataatacttgttccggcatacatagccagccagataacacaaggaagtaaattacagttgttttttaaagatagtcttagtgaagtggtactaaggaaaaatgaaccgtagtctatgggaaatttgacaccaagtataggggaaaaatgatactctatacattactacaatactaacattacaacatagataattcagtgcttcgcacttcattatcagattttgagcttgcgtagataagtaactaatgataaaaacgtaacattatgatgatatacaacaacagactgttcaataccagaaaggaattgaagcggtatctaggtgggacacgtaaatacaacaaggctctgaaaagcggagagatttataacatataccaagaagaatcaaataaccaaccgtttgcgcacaatggaacaacaatatacgacactgacaaaagacattaataatatagataatatggatgccatagtatatgcctatataaaatcaaggatgaactataaaacattcattgcggataatgttacagaaaaggagatttccgaaaaactaggcatatcattaagcactgtaaaaagaagcgttgcaaggctaaagaataataagaatcttattgataaagtaataagtaacaatgtaatagcagagggaagctacaagacctacaacaaatatcatgtggcaaaatgtaatgaaggcttcttctatatttataacagtttctttaatgatgatatgaacatagcaaaagccagtgagagaatcaacgtaaagaacttcttgcttaaaataaaggcaatatgtaaaaaggaaacgaacaagtatataagtgaaagtccgtatctggatgggcttaacaaaacggaactttctaaaaaactgggcattgatacaaagacattaaataaatatctggaaatggcagtcaatgcaggacagataaaatatataactaatggtttgctgatactgaacaagtccattattccagattttaagaaagatgatacagatacaagaatctatcatattatttatgactggtgcattgataacggtgttgttccaccagacagaaacgatgaaataacagtaatggaagatggcagtgtcagaagaagaaacagattgcttcttgaaatagcaggaaagctagattatatgaaagatgaagaaattaggagtttgctaactaatagaataacttccgaagaaataactttggagtatatagctaaagtgctgaatataaataacaagaagaaagaagatatacagtattccgtcatgcttgactaaactagctaatcacctatattcagtttagctaaaagtcaagagagcaaatatataaggtacttcatataagaatccccctccccattcaatcagtaaccttaaatatataagagtgtctgcctttacggactacgtgccccttagtccccctctgtatattgatataaaaaagaattattaatcatttaaacttttatcaatatgaataatttagttatcatgccaacggagaaaagaactttgaatttaggtgagtatgcagaagaagctactataattgtggaagaaactgcaaagcctagtgttacctttttggaagcaaatacagattctatcacactggaagaacttacaagcaaatgtgttgtgcctacttgggctaacttggaatcaaccatttcacaccaagacttcgtttcatgtgtgcatgaagctgcaagttcattctatgcaggtgaaaaggtgaactttccggaaataagagtttcgcatatagtacgtggcagaataccgtccgcgcttggtaagaaagcaaatgaactgttagaatgtgaaaagacacaattctatcaaagacttgcttttgcttttactattccaaccatttttgaaacgataagaggacaaaaacttgaactgtgcataggtggggtaagaaattacagtgacttgaatctgtaccgttcttccaaaggcttagaaaagttttccgtctttattggttggagaatgagaatttgctctaatcagattcttactggtgagggtgtgaggttcaacatggaagtaaccaatatcaatgaactttacagaaatgtactggaattgcttaacagcttcaatgctgccaaagaaatacatttgatgcagacattatcagatacttatctatctgaaacacagtttgcacaagtggtaggcagaatgagaatgtaccaggcactttcacccacaagacagaaaacaataccaagacttctaatcactgacagccaaataaatagtgtgtgtcgtgattattacaccaatgaagtttttggaatgaaagataatgccatatctctttttgattttcataatttactcacacagtcaaacaagaacagctacatagacagctatttacaacgtggggtaaatgctacagaggtaagtgttggactgaacaatgtattacaaggactggataataaatattcttggttcttgggctaaactaatcaatgagaggacatctatttattaggtgtcctttcttttttaataacttaaaaatactacagaatgaatgataatggaaaactagtgctatggggcatactagtagtattgctactaataataattggtgttatcaatccttttttattgatactgattatatctatctttatttatatacaatcatagaatattcactaatatgcaaagtgaatgttttgctataaatcaacatattaactaattggctagtatattggtaatggtgaaatattcacttttatttatttacatataaaacagaacattatgagtttaaaatattcaagcactacagcagattatctagtttggtctgatgcaatgaatttaataaggaaattggctaaagatggtaattacaaaatttcacttcttatagctttggggtgtttcactggtttaagaatatctgatattctagctttgagatggaaacagatactaaataccagtgaatttacagtaatagagaaaaagacaagtaaggtgagaactattaggataaatgctcaacttgggcagcacattaaagaatgctatgagcagataaagccaataggaattaatgcacctatcttagtaagtcaaaaaggaactgttttcactgttcagagaatcaatgtaatactaaaagagataaagaagaaatatcacttaaaagtgaaaaactttagttgtcattcacttagaaagacttttggcagacaagtttataatatgaacagtgacaattcagaactggctttagttaaactgatggaattatttaatcattcaagtgtaaccataactaaaagatacttgggacttagacaagaagaactattaaatacttatgactgtttgagtttctaattagtgggacaaagtttgaaatttctgttgttatcataccattttcagaaataaagaactttgtcccgttctctaatatacagtaactttcaaaaactgcaatgtaagagaaactgtaaataatggttatatataaatctgatgggacatgattccaagccaaacagattgcgataacgtaattaattccgcactggtgcaagcgtaagaaaattatctttttaaaaaggcatgatacggcttgtagcttatagtatgttgatttttcagaattatttataagttataaacagccgtactaatctgcaatatcagaaaaacagctataatgtttataactgatagtaggtatgagttttaaaaattatcgtcttatatgcccacttcaaattttcataccgctattgagttacacagattagatattgattttactgattatttagttagactgtaaacctttataccttatatataatagaagatattcatttttcaatccgtaaaatctacgggtacttttttcgggaagaaatcttcttatagtccccattcaaaaaaagtacccgcttatgcaattacaaagaaaagaagctgatactatctaattacttactacggatatgttttggaacacttggaactgcatttatcagcgttttatctttagctattcaaaacctttcgctaactttgcagcaatttcagaggtcttaatgcgttaaggcactgaaaggacatatttaacgaaaggtgttattgaaattatcttctatgttcaaatctcgcaaatttgacaaaggtacgaagatgatagcaatagcaccacaccatttgatatatacctaccttatatgaacttataaggcttttagatattgtcaatattggtgtgggttgctattgttttatccgtaccaaaggcaatgcgagagcctgaacataggataaagcaaatatgtacccacaccttttctatttaatataactgctttttaagggtactgaaaagcacaaatagaaaatagagatgaaaacgtttagattaattggaatggctttattagccgtagtaatgtgtgtgaattttgcttcttgcagtgatgacgatgacccaatcaaaaatgatgatggtattatcaccaaccaaaagaaactaatggagattaaagaaacatctgatgatgggtatatcagtatatatacattctcgtacgacaatcaaagtaggctaacatccattgttgataacgaggacggacattcagacaacaatattatcaatttcacttggggcaataataccattattgcaacaaaacgtggagatgcaagaagaacatacacactttctgataatttagtgagaaaacaacagaacaacgaaggagcttcaaaagcatttacctataactcatccaaccaattaattaaagtagatgaaacggatgaaagacatagtggtgacgattgcagctatacttatacttgggataatggaaaaatgacaaaacatatatacaaagagaataatagtgaaaaatcttatgtttatgaatacacttacaacggaaagacttgtaagggatggttcccaaatatggaagatgaaggctgggatgctttagatgatgattatattttcttcgcacatcccgaactcgtaggtatgcgcactaatcaactgcccgaacagatatttagtaaggatactgataaaagcgaatattacgatgaatattataaagagacttgcaaatatgaatatactgatgaagaaacaactaaatttgactatactttaaataaagacgggtatttggaaagttgtactgtaacatatacaagcgtagaaactaccaagcgttcatttacagacaagaatggtgacggtgttattactgacgatgaaagaaatgtaacagaaacacgtactcgtactgatattgtaatttacaccttcaaatgggaataaatgcattaaataaattcacattaaaaataaaacaacaatgaaaacattcagattaattggaatggcattaataggtattctctttagtgtaagttttacttcttgtggtggtgatgacgcagaaatgtttgcaacatataattcaaatgccaaaggagtagaaattactattcgtggaactgattacgaggaagagaattggtattatttcattaacaatgattacctattacttacaaatgatagcccaactataaacggtgattcaagaggtgatggcttttgggatttttacgtaaaatatgggaatccatataaacgatttacaatggaagttatttacgattatctaagcgattcttatggagttccaactgatgaacacacagatttaagtacatttgaatacacaccggaagcgcaaacttttgttgattgtatgaaatctaagttatcaaagtacgattacatagtatgttatgaggggtttcctttttctgtagcgttatttaatcgtacttcaaatgagaattttaaataagattttatactgaataagcaaaaagccaacctacccattataaacaaatggataagttggctttttcagttctgaacaaatcattaacgctttctctttttgaacttcatggatggggtaagtccatacgcactttcaggaaaatatgtgcggagaaatttatcacttgctaaactataagtggtaatagtgtgcgtttccatgtaatcgggtataaggcatacccttgcatcttttttcattgaatctttcatagctataaaattttaagtttcacatatacaagcatatttagtttctagaacattaccaagccataaacacaaaactttcaatgaactacaaataggagtactttcataactaatactagcaatgagatactgaaaagaatacaatataagcaattatatactactattgaacatactacccacctaggtagtatagtaccgtatatagtagtagggctacaaccctctttcttttagtgctttctttctggctctgtattccctttgtcttctggcattttcttccttatgttctcgacaatattttttattatactctgaacttttctccacgtttctaggagttataaaccgcctttcatagcactttatttcttcccctttggaatatccgtctatcagtgaaaacactttgttggctttggtatgcagttcaaatctaagcggttcgttattatatggtatatagatagaaatattacacttgatagtattaattctgtcaataaatgcgtattctatagtttcgtgtataatctcaaatctcaatttatcatccgtaatattagaaacgtccagttctttaggctcgtccactttaatcagcagaccttgaatctgttccctttccatataatactgtgacagcatttttctttcatcagccaatttgccacctagttgcttgataatccctttggctctgtcaatgctcatagttccgtccagataagcactgtcttccaccttggttattctgttctcaatatctttcaagtttttttcggaagtggcaatcttattatcgtattctttcagtttcttctggtaggcaattctatctttagtattaccagtgattagcttactaaggtaaagtcccgaagcgacacgccacaatatactatccacaatatttatttgcacccatatccctttatcgcaattctggcagtgataggtgttgttatttttcttggctaccataatactgccacaataaggacatctaagcaaacctttaccaaagtaataattatcatatttctttttgggaagcaatatattgcccttggcaatctccttacacttgtttatcatttctatggtaactatcggaggataaacattaccttctgtttttaatttgttcaaaccactagaactggacggttcacccgcataggctatatttctaagcgtcaaactaacaaacttacaagcataggttctactaccttttctaatgataccttgttctgtcagttctttagccaatgaattatagctgtaattaccagtaagatacatattaaatatttttcgtactacactggcttctttttcgtcttccactatcctaccattatccaccttatagccatatagcaaccatccaccagtatagatagactgtttacggttagcatccttggtacgtttccatctggctagtttggttctcatttcactttctgccatctggctgaacaaggtaaataccatatctgccgcctcatctacagtcccatcatcttttaacagtctgattgacgggttctttactataagctgtacctttctttcaaccagataatccaagacactaaagtttatcttcttctttctggcgatacgtgatacttcccaacaatagacacaatttatagtattgtctgattctatcagttctttcattctgttaagtccggcacgctcttcttctggcagtttaataccagattctttctcgcaaatagaaataatatcttctggcttgtaaccgtccttgacagccatccgataaatctccttttcttgttcgtcaaagtcctgcaccttggtagatactcttactaataatattgctttcatactatcatttactaatcagatgcaaatatactaatataagtaacaagatatttaaatataggtaaagaatatatgcccttgggcatgagctccgggttttcgaacagaacgtgtactcttaatatttccgtctctccgaatgtaataatgataaccgataccatttagtccacgttggcggtgcgacttttccaattcaatttccgttaatgtttcattctccttcgttgcggagcaatgaataactatcagatgaacagttctcatagctgttaaatgttttgtaaggtgaatagtttgtttattaatcgcatgagaacaacagaaagagaccaaggttcacattaacagttacttatttcccctttttgtattcttttataataaaccagacgacaaaataactgttcgaaatattttaagccggaaacattttcctcactttttcttccaaaaccgatagggtttttcatttctgagcgatcttagtagtagaaaacgagaattgttcacctttaaaatcatacgaagatgaaaaagttagctagtattgcagttgggtggttgatggcatttttgctgttgggtatttcacctttatgggcacaggaagaagccgggaactatttcactattacaggaatagtgaaaaataaggataataagagaaaactggagaatgtgaatgtgtctgttcccggtacgaacatcggaaccgttacgaatgcggatggtgtgttctctctgaagataaaggacacggagactattctgggattggaggtttcacatatcgggtatttgaattctcaagtttctctgaaggataaggaagatgtatctgatctcactatctggatgctgccggctcctaatctactgagtgagattgttgtctttggcaataacgcccgggggcttgtggaagaggcgattaaaaaaattccggtgaactattcggttgataagaatttgctgactgcattttatcgggagacagtacagaaaaggcgacgctatatcagtgtatcggaggctgtgatagatgtgtctaagactgcgtacagtgaccgggaaccatcgaacgatagagtgcaactacaaaaaggacgtcgcctgctgagcccgaaaaccagtgatacactggcagtaaaagtggtgggcggacctaatctttctatttatctggatattgtgaagaacggagatgcattgttgagcatggaaaatctgaattattatgattttcatattgaggaacctgtgaatctggataatcgtatgcaatatgtagtcagttttcgtcccagagtcagcctgatgtatgcattgttttacggaaaactctatattgattttgagaaactggcattcacccgtgcggaattctctctggatatgcaaaacagggtgaaggcggtggaagctattcttcataagaagcctctcggattacgtttcaggccacaggaagtttcctatctggtgacgtataaggaacagaatggaaaaacttatctgaattacatacggaatgaaatccgtttcaagtgcgattggaaaaagcgtttattctcttccagctataccgtattttccgaaatggtggtaacagatagaaagagcgactttgcagccattcctagcaagaaggctttcaaagaaaaacaagtgttctatgatttggtagacgaatattggaatgaggatttctggaagacatacaatattattgaacctacagagtctctggaacatgctgtgagtaaattgaaaaagcaatcccgttagatttcagatagttttcttatatttggagaccaacaataattccggagtatgctgaatgagctgttcatactggctaaaataagagagggcgatataaaggcgtttgaggaaatcttccgtcgttactattcccctctttgctggtatgccacaggtattacgggagagatggaagctgccgaggaaattgtggaagaattgttctacgtgttttggaaggaccgggaacatttgcagatattccagtccgtaaaaagctatttatataaagctgtacgaaatgcagcactccagttttgcgagcataaggaagtcaaggaacgatatcgcgaatatgtattggcgggtaatgctacggaacaggattctgatcctcaccggcagttggagtatgaagagttacagggactgatccgtcatactcttgataaattacccatgcgccgactccggatatttgaaatgcatcgcatggagggaaagaaatatgcggagatagcttcttcattatctctgtccgtcaagacggtagaggctgaaatgacgaaagcgctgcgaaccttacgaaatgaaattgataattatatccttacgaaatgattgaagtgaataaaaataggacgaagacggatgaggcatgggaacggttgtatgcccgtttggatgaagataacctgctcacaggagcagggcgggaaggggtagtgcgtcgcaaacttctcttgaaatggggaacattggcggctgccgtaattgccggtttcgtctatctggcatctgcgttgtggtttgttccgggaggagagatcgaaagcctcaatctggtgacacaagaaaatcgtgaagcatccatgttggttaccacgctcgaagacggttctgtagtatatctggcacaggagagcacgctgaagtatcccgaacattttgctacggacaagcgggaagtgaacttacagggagaagctttctttgatgtagcaaagaaacatgaacaaacttttctgattgaaacggaaaaggtacagatagaagtgttgggtacagctttcaatgtccgtagtcatggagatgactctttccggctctccgtgcagcggggcagagtgaaggtctcgctgaagcaaggcggacaaagtgtactggtaaatgccggggaaaccgttaccttgcaggcgcggcagttacaactgagtgagacaggagattccgatgagttcagacaatatacaaagaatatacgcttcaaggacgaatgcctggaagatattctgcgagtggtgaatgccgaggcttccgctttgcagatacagacggcatcaccggttctgagtaaacggaagctgaccattgaatttgagaataattcccccgaaacagtagcggaacttatttgctgggcgctgagtttgaaatgttcacgtgaaggtgataaactgattttatccgaatgataacttaactatataaatcatgaaacttcatcgtttcttcataatttttctgagcctgcttctcattacctgtgatatgagggcggacggaggagatgtgttggaacgtatcatccggttacccgggacgaaaggaacggtatattccctgttgagcaaagtgtcggaacaatccggttatcttttcgtatatgacagtaaggtggtgaataatgacattgaagttaggacaaaaaagaaaaactgtacggtccggcaagccatctatgaaattgtaggcgaccggacattagaactgaaagtgataggaaatcatatcttgattctgcctcctgcggagaaggtcgtacggaagcggaaagtctcggaagagacacctttgccagcctatttcaccattaccggtcttttgcgggataaagaaacgggtgatcccgttgtgagtgcgtcggtcattcttcaaggaacttcaataggtaatattacaaataagaacggggagttcaggcttaatctgcctgactccctgaaaaatggcaagctttctttttcccatttaggatatgttgcacaaagcattgaagcatctacgctgattggccgggacaatgtgttgagcctggaacctaaaattgttcctttgcaagaagtgttgatacggttggtggaacccaagaaactattgcgtgaaatggtaaatcagcgcggggaaaactattcattgaatcccgcttatctgactacgttctatcgggagggggtgcagttgaaaaataaatttcagagtttgacggaagctgttttcaaagtttataaatcttctttgccggagatgaacgtatccgatcaggtgaagctgctaaagatgagtaagattgataaccgggagagtacagacagtctggttgctaagatcagggccggtatccaggcttgtttgcagttggatataatgaaagacctgccggattttctgtcggttgatgcggaagataatccgtatatgtatacctccggtgacattacattcatagatgaccgttgcgtcaatgtggtttattttgagcagaagcggagtgtcaggtcgcctctttattgtggggcgttgtatattgactctgagaacagtgctttggtgcaggcccgcattgagataaatcccaagtacatcaaggaggctacacggatctttgttgtcagacaggcgccaaagataaatctgacgacacagaaggtggtatatactatttcgtataaaccgtggaaaggtacttattatatccatcatatccgtggcgacctttacttcaagatgaagcggaaacgttttttctttagcaaccctactttgcatacttggttcgagatggtgacctgtctggtggatacggagaatgtaacccgcttctcccgagctgaaagattgcctccccgtaccgtacttgcagatgaagagtttaagtatgatgaacatttctgggaggacttcaacgttattccattggaggaagaactcagtagaattatagagaaagtagcgttaaagatagaaaaaatagatcagcaggaggaataagatagtccggataattgtaattttgcagccggaatcaataagtattagtagaaagatggaattacctaaagacccgatgatgcttttcagcttcatcaatacgaaattgcgtgactgttattcttcattggatgaactctgtgatgatatgaatgtcaataaagagacgattgtaggactgttgcagtcagccggatttgaatatagcgcagaacataataagttctggtaatttgcggatagattattttttcttccggtgctctttcttcagatagaaattgaatccggcatatatttgcaacgtcccgaatccattgttcagggagaagttatcccggtaataatcatacgtcctgcccagaaaggaagtacctacaaaatatttgctgttattgtataccacacccgcccgtaatataaaatcaatattgaagttcttgtaccagtcgctgggctcttctgtgtctttctctatgcgcgacgtcttataagcaacagccggactgagcgacaggcatgccaggcagttacgggcaaatacccagttataggcatatccgaagttgaggctgatattggtatattttatgtgtctaaccttcattccggggttcattgtttcttgaatgatttcgggtagcttggcataatcaaacttcaaattatgcgtagatacggaaaggccggctgtgagtgtacctgcattccgacgttggttggtggactggctgaaagctgccggataagagaaatgccggttgttgaagatatagtataagttgaatcctttcatatttactttcagaccgttgaagtcttccgaataattagaaggaacacggtcggaaaagcctgttactttatgtatcttgtaatcgttacctgtgcgtcggtagaaaatatccacccctaacttggaactgtaaaggctgaggtcaaattctgtccctctgtttttcccacttttctttccaaggagcccgtccgtatctactgaccatcctaaaaatatccagcgccaaccaaagtaagcccctatcttgttgcgagggttgggggtgaagcggagccgttggggctcgggggcggcggtacctacggagtaatattcgtagtttgtgaaatgatcgagcatcaaggcatagttgtatcggttggggcttatataagttgtgtcgaaatcattgaagttgaggaacttctttatagccttcatgaaggccccctgatgcttttcggtactaaggctatcgtgtgcggtagaactttcctcttcgttttgcgcaaacaaagagaagggcaacaatatccacaggcagaagataagtcttttcagcatcaatcttatttcttaattaatagttcgggtctctatgctataaacaacgcaaaaagaaaaagtgcaattgttctatttgcgaatttaacagttcttttgcatatatccaataatatggaaggattgtttcattatacctcttctttttcgttgttcctcctcgtctgtagtttcaccgcttgaaactgttggtttctcggtgtgaaactgtcagtttcaaagcatgaaactcttggtttctcggcatgaaactatgagtttcaagcaatgaaacaaatcagaaaatgcagaggttaatataatcggacagataatgcagagaaaggagatacagtgttagcaatagattattactatacttaccaatattgcattagtcaaagattggatatgttaattattaacacaacgaatccttaatagttaacgaaaatatagtgtctattaaaacatgttgtaatatgttgtagatcaccctgaaaatttggagatatcctcaaagtccgtatctttgcaatgtgtttttcatagtattagatttaaggttaacaaaagattggctgtctgggatagatagcctttttttatgtcctttcgttatcagtcttgaggagtgaatacatcttcatatccagaatctgtccgttcttgactgcattacttctgagtgttccttcgtctttgaatccgcttttttcaagaatccggcaggaagcgatattatagctaaacggctctgcaaaaatacggaggatatcagtgttactaaaaacatactggcaggtctgtttgatagcgcaggttcccaagcctttgccccaaaaaggttctgctatataatagcccatttcggcagtcagcgagtggatgttgtctttgcgaaacacaccaatacttcccactactttgtcatcagcggtgatggcgaaggcgaaaatactgttcttatcggccttcagcatttcattgatataatattttgcatcgtcttcagtgtagggataaggcagaccgtcccgaaggttgtcctgaatgtttttgttatttagggttgctgcaagttcggcggcatcgtctattttccattttctgattttacattccatatcgatatccttcttttttagttaatctgaaacgggagagttgccggcaaagataagaaactttatttttaaccacttatttaataaatgcaaaatgtgaacttcccgatttaacttcatccttctttctgtttctaacctaataaagctaagaaactgaattgatgataaacgaggataagatccggcaggtatatgcttccgacccgaagaaagggtttaagatgctgatggataacttccaggtacctatatataattatatacggcgtttggttgtgtcgcacgaggatgcagaagatgttcttcaggaagtctttatccgggtgtaccgtaatttggaccagtttcgtggtgaaagctcgctgagcacctggatatacaggattgcaaccaatgaaagtttgcgcttgctgaatacacgaaaggatgaagaagcaattcctgccgaagaagtgcaagaggaactgataggtaaactgaaggcttccgattacattgattacgaaaatgaactggcggtcaagtttcaggaagccatactaagtttgcccgaaaaacaacggctaatattcaacctacgctattacgatgagcttgattatgaagaaatcagccgtatactggatagtaaggtcgatactctcaaagtgaattatcactatgcgaaagaaaaaataaaagaatacatcttaaacagataggacgatgaataaagaatttgattttgacgatatcggtaaaaagacaccttaccgcactcctgataatttttttgaggatatgcagcagaaggtaatggaacgtacttgcggcgggcagcgccggaaacatcgtttacagataatgttctctactgccatagcggcagctgcaatactggcaggggtattgtttgttccgtcttatctccggacggaagatacacctgcaggaacttcggatatgttggctatagaaagaagtagcagcgatccggttgataaatggattcacgaactgtcggatgaggagttggaagagctcgtcaacttctctgagaatgacatatttttaaattaggtattaattaaaaacaagaagattatgaagactaagtttatttatgtaattttggctgcgctcctgattggtagccagacaatttctgctcagaacaaggataacaaaaccaataagcaacgtcctacacctgaacaaatgattcaaagacaagccaatcagatggtgacgacactgatgctggatgatgcaacagctgccaagttcactccggtttacgaaaaatatctgaaagatttaagcgaatgtcggatgatgaaccgcagggaaaggcccaggaacaataatgcggaagcaaccccggctaccaaacctgtactgacagatgcggaaatagaaaagcagatcaaggatcagtttgcgcaaagtcgtaagatactggatattcgcgagaaatattataatgaattccgcaagattctgtctcccaagcagattgcaaaaatctatcagacagaaaaaagcaatgcgaataaattcagaaaagaatttgacagaagaaaaggtcagaaacatggtcagggaaaacggccggctcatgcaagaccagcttcaaataataaataacatttttcattaaactacttgataaacacgaatggatcatggcaggcatacatatttgactttccgaaacatcttaatctatgttgttttgttgtggtcaggtatgactgttaatgcacagtccggcaaaggaagctttgccggacgtgttgttgataaggatacgaagcagccggtggggtatgcggcggtacgtttattgaccttgccggacagtacttttctggcgggtgtagccactacggacgacggtaaattcaggatgccggttgtctggcccaaagacaagaaattgcttttagagatttctttcattggctataccactttttctaaatctattccttcttcattcagaggtacttcgcagaacttgggtgatattgcactattttccgatggcattttgttgggcgaaacggtagtggtggggaaagctcctctggcagttaccgaacaggataccacggtcttcaatgcctctgcctatcgtacccccgaaggttccatgctcgaagatcttgtaaaacaattgcccggtggagagatcgatggcgatggaaagctgttaattcatggtaaggaagttaagaagatattggtagacggcaaagagttctttgcggatgatccgaaagctgccttgaaaaatctgccggtggaaatggtggagaagctgagagcttatgaacgtaaatccgatttggcacgtctgaccggaattgatgacggggatgaggaaatgatacttgacttgggggtgaaaaaggacatgaagaaaggatggatggataatttcatggcaggtacgggtaataaagggaggtatgaacttgctaataccctgaaccgcttccgggataattctcaacttactattatcggtaatctgaataacactaacaatcaaggcttctcggagttgcaacgggagtcgtcggctgccagtggaaatattctgaatagggtgggactggtcacctcacattctttaggcatgaacttcactcatgactgggacagagtgaagcttcgctccaatgtgcaatatacgggtaccgaccgttcggaggataacagtactacggtggataatttcctgaaacaggataaatcgataagccacagcactaacagcaatcacatgaagaaccacaacctgacggcgaatgcttatctggaatggaaaattgattcagtcaccaatctggtgtttcgtccgcaatatcgctatgtggcaagtgacaggaggaatagtggatatcaacagagttggtcggacgaaacacttctgaatgaaagaacggcttctaatctttacgataattcccagtataatctgacctttatgttgcaagtcaaccgtaagttcagtcgtaaaggacggaatctggctttgaaagtggattatggaacgaatacttcttctgccgacaggaaaaacttttctactacacattattttaagaatgatacagagaaagtagtcaaccagcgtgtggatgatgaaggtgatggatataattatcgtctgcaactggtgtatgtggagccgttgcctaaccgttattttcttcagtttcgttacagctatcaataccgggtaactaattcggaccgctttgtctataactgggatgaggcaatggaagattttgttgccgattacgattctctggccagtaatagttttgagagccaatacagcacccatcttttcaatatggctgtccgtacttcccggaaaaagtacaactacaatataggtgtcgatctggaaccccagaaactggatagccgttcttttctggatgatgtttccaaacatcaaatgagtaaaacggttctgaacttttcaccgacactgaatttccgttataagttttccaagcgtacacagttgcaggcaatttatagaggaaaaggacgacagccgagtgttcgtgatctacaaccggttgccgacatgacgaatccattgaatatccgcatcggtaatccttctttgaaaccttcatataccaatacgtttacactgaattataattcgtataatgtgaaacatcagcgcaacatggtggtctctctttttgtggagaatgtgctcaacagtgtaacgaaccaggtgacttacgacagcgaaacgggaggcagaaccaccatgcctgttaatttgaatggtaactggcgggcatcaggtgcactttcattgagcgggcttttcaagaaccgcaactggctgtttcgtacctattcctatttgcaatatagaaatcagaacggatatactactcagaacaaagaagagccgatgaagagttccgtgaagcacctcacagcgcgtgaacgcctgcaatttacttttcgtacccggcaactcgaactgagtgcgcgtggagaagtgctgtataataattcgtataataacgtgaaagatatgcgcacggaaacgttcgactatcaacttggaggagacttgcagtattatctcccctggggcttcgagtgcagcagtgatctcacatattttcttcgtaccggatatggatacgacagcagcgggcggaagaacctgatatggaactgccaactgtcgaaagcttttttgaaaaagaaacaactgctactacgtttcaagttttatgatattcttcgccaggagatttcaatggtacgcaccatttcggctactgccatacgtgatgcggactacaatgtattgggacgttattttatggtgcacgctatcctgcgattgaatatgatggggaaaaagtaaaaaacgcaaagtgtggaaacttcaacagggttaatttgttgtagatactcaaattaataaaagaaaactctgaggaatgtttcaaaggttcaaaaactttagaaaactgaggaagtggtatgttgtgaaactgaaactggttgatgcccgcctgtatttcgtcagcatcttcgtaggattgctgacggggttggtggctgttccctatcattactgcctatattatttctttaacttgcgaagtgagttttttgcttcccgtccggagtggtactggcatattcctctttttcttttcttttgggcggtactgatattcgtatcctggctggtgatgaaaatgccgcttatcaccggaggaggtattcctcaaacacgtgctgccatcaacgggcgcattacttataagcatcctttcatagagttggtttctaagtttttcggtggaattctttcggtctcggccggattatcgctgggacgtgaagggccttccgtacaaataggttcgtatgtgggatgccttgtggcacgctggacacgtattctacgtggtgaacgaaagcaattgcttgctgccggtgccggtgccggccttgcggctgcgtttgcggcgccgctggcttcttcattgcttgtcatcgaatccatcgaacgttttgatgctcccaaaaccgctattactaccttgctggccggtgtagtggccggtgcggtggcaagcatggtttttccggtaaattcttatcatttaatacaagtggccgagcctggtttttcttttggaatccaggtgaagtacttcctgttgcttgcagtgattatttctgtttgcggaaaattatattccatgatgatggtctctttcaaacgggtgtatgcaacggtaaagtcttcggtatatatgaagatgttctatctgttgctggtcgcttatattatttcctttatgcaggtcaacctgacgggtgggggagaacagtttcttttggagcaggcgcaatccggcagccatgcaccaattatgtgggtaacggcaatgatgctgttgcatttcggtttttccgttatctgcgtttcatccggtttgccgggtggaagttttattcctacactggtcaccggtggattactggggcagattgttggtctgttgggagtggaatatggggttattgagccggagaatgtcagttatgtaatgctgatttcaatgtctgccttcctggtggctgtgatacgtacccctttgacagctattgtattgattaccgagataacaggacattttgaggtgttctacccatcggtggtagtgggtggattgacttattattttacggaacttcttcagataagacctttcaacgtgacgctttatgaggatatgatcaatactcctgctttccaggaacagacaaggtataaactatccatagaggtgatgacgggttcatatatggatggcaaacttgtagacgaactttctttgcctgaaaactgtaccattatcaatgtacaccgggatggtaaagacgcaaagccccccggaatacggttgattccgggggaccaggttgatattgaattggatgcgcaggatattgaaaaactctatgagccgctcgttagcctggcaaacatttattgatatggatgaggtatccttatgccagactgcctatttcatccagattcttctgaatatcctgatcggtcagttcgtagtttacgaggtcaccggagagatatttatcgtatgaggccatgtcaatcaatccgtgaccggagaggttgaacaggattactttctcttcacctgtttccttgcatttgtttgcttcgcggatggcggcagcaatagcgtggcaagattccggtgcgggaatgataccttcagcttgggcaaataaacagccggcttcgaatgattccagttgtttgatgtctacagcttccatcagaccgtctttcaatagttgagaaacgatgacgcctgcaccgtggtaacgcaatccacctgcatgaatattagcgggagcaaagttatgtcccagcgtgtacataggcagtaatggagtgtatcctgcttcgtcaccgaaatcatattggaatttaccgcgtgtcagtttcgggcaagaagccggttcggcagcaatgaagcgtgtttgcttaccttccaggatcttgtggcgcatgaatgggaatgcgataccaccgaaattggaaccaccaccaaaacaagcaatcaccatatcaggatattctcctgccatttccatctgtttttcggcttccagaccgattacagtctggtgcagagctacatgactcaatacagaacctaatgtatatttacaattcggtgtagtctgagccagttcgatggcttctgaaatagcggttcccaatgaaccctggtagttggggtgagccgtcagaatatcttttcctgcacgggtggacatagacggagacggtgtaacctgtgcgccgaacgtctgcatgatgctgcggcggtaaggtttttgctcataactgattttcacttggtaaacggcagcttccagtccaaacagacgggcagcgtaagccagcgaagctccccattgtccggcaccggtttcagtggtaacgttggtaactccttctttcttgcaataataagcttggggaatggcagaattcagcttgtgcgatcccatcggacttacactctcattcttgaaatagatatgtgccggagtacctaatgctttttccagtccataagcacgaaccagtggagtactacgataatatttgtacatttcgcgtacttcttcgggaatctcgatccacttatcggtctgattcagttcctgtttgcacagttcctgtgcaaagataggatataaatcttcggctttcagtggttgtttggtaccgggatgaagcggaggcatcggtttgttcaccatatctgcctgtatattgtaccaataatgtggtatttcctcttccgggaggaaatatctttttgtcttgttgctcatagtggttacttctattaaaatttttacgaggccaaatgtaactattatttttaaaacaatttcttttttcttttgttttttgtctatacgcattgttttgtttatgtttgcccgatatttaatttgatgtctacatgaagatttatcataaattcttgttgtatcagaataaatggattcatccgtacactcggatcattcttggaggggtgacttatatagcctacctggcttctattctgttaattatgggagtggtatatgaacacggctttactatttccgaacacgaggcttctcaactgcaaacactctatcggtttgtatggggtgttttcctgtccgaagtcactttgcgcctgttattggaatacagggacacaaagcgtacttttaagaaattgacgtggatattgattgccttgctttaccttacccttatccctgttatttttcatcgaccggaagaggagggagctattctgcatttttgggaaatattgaatggaaagccctatcatatagtgcttctgttgatcttctctttccttaatttatccaatggcttggtcagggtgttgggacggcgaacgaatccttctttgattctggctggtagttttctgataatcatccttattggaacaggtttgctaatgttgccccgatgtacggtgagcggtatttcgtgggtggactcgctgtttatctctaccagtgcggtttgtgttacgggtttgacttcggtggatgtagcgtctacttttactacgcccggttttgtggtgattatcctgctgatacagattggcggcctaggggtaatgacactgaccagtttctttgcgatgttctttatggggaatacatccttttataatcagttggtggttcgtgatatggtcagttccaattcgttgaattcgttactttccactttgctgtacatattgggattcacgttggctattgaaggtattggtatgcttgccatctggagcgacattcacggtacgatggggatgacgtttgaggaagaagtggcgttctcggcctttcatgctatttccgcattctgtaatgccggtttttccacgttgcccggaaatctaggcaatccgctggtgatgacagggcataatccattcctaatctatatatccctgttgattattctgggaggtataggcttcccgatattggtgaatttcaaagatatagtactccatcatttgcaccgcatctggaaatttttgcatacgtgggagtgggacaggcatcgtttttatcatctgtataatctgaatacacggattgttctgattatgactttcctgctattggtgtttggtacggtgcttatcgctgtttttgagtggaatcatgcttttgccggtatgtccgtcgctgataaatggacacaggcgttctttaatgcgacttgtccgcgtactgccgggtttacaagcgtggacctggcttcgctgggagtacagagtgtattggtttatatcttcctgatgtgggtgggcggtgctgcacagtccacggcgggtggtatcaaggtgaatgcgtttgcagtagttgtattgaatctggttgctgtgttgcgcggtacggagcgggtggaagtatttggccgtgaactttcttacgattccattcgccgttccaatgcgacggtagtgatgtctatcagtgttttgtttgtatttgtgtttattctgacaatctgggaacctcaggcatctgtcatggcacttctgtttgagtgtgtgtcggcgttgagtacggtaggttccagtctgaatcttactccgactttgggggataacagtaaattgcttgttgcttttctgatgttcatcggacgtgtgggactgattactctgatgttgggtatcatcaagcaaaagaaacatacgaaatatcagtatccgagtgggcagatcattataaattaaaatagtaagtagttaagaagtaagtaggagatactcctaactctcaattctcaactttcaactcaataagattatgaagtatattattatcggtttaggaaattacgggcacatgcttgccgaagaattatcggcattgggacacgaagtaattggggcggacgtgagtgtaagccgcgtagacagtatcaaagaaaagattgctacggcttttgtgttggatgcaacagatgaacaggcacttgccgctctccccttgagtggtgtggatgtggtaatcgtggctattggcgagaattttggtgcttctattcgcgtggtggctttgttgaaacaacaaaaggtggctcacatttatgcgcgggccattgataatgtacatcgttccgtacttgaggcttttgatttggaacggattcttactccggaggaagatgcagcccgtggtttggtgcatttgttggagtttggctccaatatggaaaccttccgggtagatacggattactatgtggtgaagttcgctgtgccggagaagatgataggatattatgctaatgaattgaatctggataaggaattcggcttgaagttattggctttaaagcgtgccaagaccttgaagaactgtctgggcatttcatttaccgaacatgatgtgatgaatgaattgcctgaaaatgatcaggtacaagctggtgatgaactggtttgttatggacgctacaaagacttccagaagttctggaaagcgatgtaattacgctttcctataagattttctgtcatctaatatatcattcatattttcttgtgcccatgaaattaaggagtttatatggggcaataacgacatggctctatctgtcagcgagtattccactttaggagggacttgtgcatagatttttcttttcacaagtccgtcttcttctaatgtgcgtagagtaaccgtcagcatcttttgtgatatgtcaggtattgtcttttgcagttcattgaaccgcatgacgggtgcctgcgtcagtgtgaagagcgtcagtatcgaccatttatcactgattcgtgatagtatcattcggataggacaatcggcataagagctattttgtatatctattctattcatatctttctgatttataaaacactctacaaaagtaactaatatgccgattgtatgcaactaatcttattgaaatatatccgggcttggactgttttagtgtagtccactcagccactctaccatcttcggatcacgatgcgagaagaagcaactggtattggtatccagcgctgcaatctttttcatatcttctttcgtcagttcaaaatcgaatacattgaagttttcaataattcgttctttgcggatagatttcgggataacgacaatatttctttgtatcaaccatcgcaatacgacttgtgctatggatttaccatatttgcttgcaatggctgccaatgtttcattctggaacatattgttttttccttcggcaaatggagcccatgattctatctgaacgcctttctcttgcatgaatgcctctgcttcgatttgttgatagaaaggattagtttctacctgattgacggcaggtgtgatttcattatgaaggatcagatctaccaagcggtcgggcataaagttgctgacgccgatggaacgaatactgccttccttgtataattcttccatagcatgccaagcgccgtaatagtcattgaatggctgatgaatgaggtacaggtccagataatcgagttgcaaacgtttcatggatgcttcgaaggctttctttgctttgtcataaccggcatctgatatccagagtttggtagtgataaacaagtcttcgcgggggacaccactgcgtttgatggctcttcctacagcttcttcattaccataagcggcagccgtatctatagaacggtaacctgcttcaatagcgtcatatacacattgttcacacaaggtttgatcttcgatctgatatacgccgaaaccaagaattggcatttcgatgccattatttaattttactttctgcataataattttctctttattggattttatattaaaacactttacttccttaatatccccggacattgcagattattgtattattttaagccctgtggttatttgcctactctttttgctaactctgccggatagcggtcgcctgatactggaatagaattaagcatatcattgatcctggtcaactcttccgggcttatttccacattgatactttgtatattctcttccaagcgtttcagtttggtggttcctggaatgggagcgatccagggttttacagcgagtacccaggccaatgcaatctgtgcaggtgttgcatttttctcttccgccagctttctcacaaagtcaactataacctgattggcattcagattctcggcagtgaagcgtggaacgatactgcggaaatcgtctttaccgaattgtgtgtctctgctgatgtttcccgtcaggaaacctttacccagagggctgaagggaacgaaaccgatgcctagttcttcgagagtgggcaataattctttctccggttcacgccaccacatagagtattcgctttgaatggcagtcagcggatagacctggtgtgcccggcggatggtctgtacaccagcttctgatagtccccaatgtagaattttgccttcttgttttaattctttcatggtttctgccacttcttctataggaacattcgggtctacacggtgcagatagtacaaatctacatgatctgtccgcagacgcctgagggaaccttcaatagaactccgtattacttccggtttaccaatgacaacttgtttaccgtcgatcatctgaataccacatttggtagcaatgactacatctttccgataaggttctaaggcttcacctactaattcctcattggtgtatggaccatatacttcagcggtatcaaaaaaggtgattccttgttctatagcctgatgaataaggccgatcatttctttcttatcagcggcagcaccataaccgtggctcatacccatgcaacctaaacccaatgcggaaattttaagtccgttctttcctaattctctgtatttcataactcttgatttttttattgtttttgatgttgcaaaggtaagtggtgagatgaagtttgtaaatagacagattactgctttatgcaccattattacaggtttaagatattgattgaatacttgataatgaactgtatacacaggttacagtttcttataccaatattacagattttgcaatacaagtgatggaatgctgaaagaaaactgttatttttgtcatcagattaaatgatcagattatgggtacaatcgtaaaattgaatactgttcaggagtataacaggacaatgggagtggagacattgcatccgcttgttagtgtggtcgacttctcaacattgaagtctttaaagcatggacgtaagaattttggcttttattgtgtttttctgaaacagctcaagtgtggggaattgtcctatgggcgcagcacgtacgattaccaggaaggcacgctggtatttgtggctcccggacaagtggcaggaattgatgatgacggagaaacactgaatcctcaagggtgggtgttggcttttcatcccgatttgctacggggtacttcactgggacgtaaaatgaaagattacagctttttctcgtatgaagccaatgaggctttgcacatgtccgagcgtgaacggcagattatctttaattgtttcattgaaatacaagaagaattggaacgtgccatagataagcatagcaaagatattattgcctctacgattgagcttctgctgaatcattgccagcgtttctatgaccgtcagtttattacgcgtgaaaacataaataaagatattctggtgcgttttgaaaacctgctcagtgattactttgaatcagaccaaccgcaaactgtcggtttgccatccgtgcaatatgccgcagaccgattgcatctttctcctaattatttcggagatttgataaagaaagaaacaggtaaatcagctcaggaatccattcagctttttgtgatagagaaggcaaaagaacggctttatgatgagaataagactgtcagcgaagttgcctatgaactgggcttcaagtatccgcatcatttaagccgtctgtttaaaaaggtggtggggatgaccccgaacgaatacaggatgtagttatttaattttgtaccctaacaacgaactgaactttttgcaaataccagggaataatcccattagccttccgcctaatccccatctttttgggaagaatttctggtagagcgcctggtcgataagttgcaggcgtggttcccagttttccacctcatgcccgtctttcaggccggagcggatttgtgcttcgtgccctcgtagtgagtcgggtttaatatacttggagtttgccatcataggcccgcatacatcgaaccatacctcgccaccactgaatcggtcggccaatcgggtgagtaattgccgtacctgcttttcatagaaatacatcagtacgccttcgataacaatgataaactctccttcgggatgctttttacggagatcatccatccattgggtttccagcaaagagccggctatgtaatgatcgcccgcaggttccggtagtaaatcgcgtcgcaagtcgattacttcgggcaaatccatttcgtaaaatatggctttgtcatgttcttcaatacgttgatagcgggtatccaatctgcaacctacattcactacaattggattctttcgtgtggcaatgaagcgtcggatagcattatcaaagtataatccacgtacgacacatcctatggcactcaatttggcaccatcaaatttggagtagtcatattcgatactttctaccagttgttcggcttgccgatcacgcaaaatggcatctttccggcgactctctttggctctcatgtaaagaggtatcagcagtgtctcagctactacactcttaaactcatatttctttttcatttttatttgggaattattggaattaatacgatctggcaaaaaagaacaatattcaaattcattcaaaaaaaagagagaacttatactttgataaattctctctttttgctgttcctcacattttcttccggggtccataggctacatttattttttgccaaagttacggttcttgagtaagggaagcaatacctaaaagtagggaaattgtgttttgacttatacctatcaagaatgaagcaaataatcaatattatcagctgtttgtcctaatttattaacgtgtaaggggcgttttgtaatagcttgaatattaatgcgttataatgaatctatctcagtatacgactgaggcaccctaagtatcatactgaggtaccctaagtatcatactgagataccctcaatatacgactctgcttttgaattgtactttttgtaagtaacttttaaagtaagtcgcagaattatcacataagtcaaaattaagtagtcattcgcttttatgccttactttttcgttttgattctttggttctactaagtctcaaaaaaaatatctttctttgtagaaaagaagaaatgttttatgctctcatttgatacttatataagtcgtaaactgccgctggtcggtctgattagtgcagtctttatcatataccctaatatagcctgtctgccctgggatataaaatttctggagggagtaagttgtacgggattttattggtattttgtttatcgtttctttttcttctggggactgatttgtttgttgttacgttataatttgcgacaactgtcgacagcgcagtttaaggaacgttttggccgtaacttcctgtattcattggctgcctatgcaggcttcgcgtctatttcctattggattcactcttatggtatccgtactgattttctgggtagtacattgatctcccaattctttattctgtgttctctgtgtacgttgatcgggcatatttccatgttatactccacgcagcgtgaaaaagaacgtgagatagaacgtttgcgtatagagaatctgcaaagccgatgtgatgcattggccaatcagatcaatccacattttttctttaactccttgaatggagtgcaatcgcttattcggaagaaggatgatgaaaaaacactgatgtatgtgcatgaattatccgatatcttccgttatattcttcaaagtgataagagaggactggttactttgagggaagaactggaatttattcaatctttccgttatgtgatggaagtacgctttgccaataaactgattttctcgatccaagtggatgaggctatgcaggataaactgacgttgcctgtgctttcactgcttccgttggtagagaatgtgactgttcataataggatagacagtgagcataaaatggaaattactatcaggctgaacgagcaaaaagaactggtggtgagtaatcccacttatcctaaactatctccgcctgatacgaacggaacagggttgagaaatctggaaagccgttttaccttgttgatgaacaggcaaatacggatagaatgtgatgaaaatacattcagagtatatcttcctttaaataaacagaactgacatcaaaattgcatagagatatgagagtgttgattgtagaagacgagactgccgcttatgagaatctggtggatattcttggcgaagtctcttatgatattcaaatagccggtaatacggaaagcgtaactcaaaccattcattggctgcaatcgaatcctgcaccggacgtgatatttatggatattcatttatcggacggttcggcatttaccatttttgataaaatggagttggaaactcctattattttcacgacggcttatgacagatacgccatagaagctttcaaggtgaatagcattgattatttgctaaaacctgtcaaggtggaagatgtaaaacaggcactggataaatacaaaaaactgacgcgccaggatgtgattcattacttatccaaattgactcaattggtgccgactcctaaatataaagacaagttattaattccatataaagataagctgttacctattgacctgaaagaagtttcatgcttttatacagcggataaaaatacctgtatctgcttgaaagacgggaatatgtatccatactccaaaacactggaacagataatggcttctctgaatccggcagattttatccgggcgaataagcaattcatcctggcaaggaatagtgtgacggatataactatctggtttgataaccgtttgctggtaacactggatgtagaaactcccgaacgtatctatatcagtaagaataaagcatccgagttcaagtcctggatagtgaataacacgtaagttagaatacgttaatcagtaattatggtatttacaaccgtaatttatctacggtttctatcagtaacgatccctatatttgcaatcgggaactattataaaattaaagagttatttcaagatgaaaaaagagagatttgtacttgcattctttacaggctgcctgattagtgcggtaagcctacaagcacaaaccggcaaggacagcacaaaggtagcaagaagttatgcgatcaatgaagtagtagtaacaggtacgcgaagtgaaacggatgtgcgtcatttacccatgaccgtatcggtagtggggcgtccgcaacttgaagcgagccagcagacttccgtacttccggtgttgaattcacaagtgccgggctttttctccacttcacgtggcgtaatgggatatggtgtagctaccggtgcatcagggcaaatgtctttaagaggtattggaggacccgcacaggccggtcttcccactacgggactgttggttttgattgacggacatcctcagtatatgggactgatgggacaccccattgccgacgcgtatcagactatgatggcagaacgtgtggaagtgctccgtggccccgcatccgtgctttatggttctaacgccatgggtggggttattaacattgttacccgtaagatgcaggaagacggaatacgtacaaacatcaacattggtgccggatcctatggaagcatacagaccgaagccactaaccgcataaagaaagggcgcttcagtagtacggtgactgcctcttataaccgtacagacggtcatcgcgctgacatggcctttgaacagtacggcgggtatgccaaattaggctatgactttacggataactggaaagtttggggcgatgtaaatgtcactcgttttaatgctactaatccgggatcggtaatgaaaccatatatagacaatgatcagcgtattacacgtggcatgacttcttttgcattggagaatcattacgaaaagacttccggtgcattgagttttttctataattggggtgatcactggataaatgacggatatcagccaggaggagaaccgcttcagtatcgtttcaactctaacgatcagatgcttggagtatcatggtatcagagtgtacaacttttccaaggcaacagactgactgtaggagctgattattttcactttggcggtgaggcatggaaccaattctttgatgggcatcgtgaaacttcggcgaataagtcattgaatgaagtagcaggttatgtagattttcgtcaggatattgctgcatggcttacgctggatgccggagcacgagtagattatcattcgcaaacgggtacagagttcattccgcaagtggggctggctttccatcttccggagaatgcagaaatcaaggcaatggcaagtaagggtttccgcaatcctaccattcgtgaaatgtatatgttccctccgcagaatccggatttaaaacctgagaaactttggaattatgagctttctttctcacaacgtcttatggataatcgtttgtcctatggactcaatgtgttctatatcaatggtgaaaatctcattatacgtcttccaaatccaaatggtagcggcatgttgaaccagaattccggcgagattgaaaactggggagcggaagctaatgtaggataccagtttaatccggtgtggagcgtgatggcaaattacagctggcttcacatggaaaatccggtattggcttctccggagcataaactgtatggaggagtgaacttcagaaaaggacgttggagtgcatctaccggcatccagtatgtgaaggggctttatactgatctggatgctgcgacaaaagagaactttgtattatgggatatgcagggaagctttaaggcgaccaattacctgtcattctatgtgcgtggtgagaacttgttggcacaacgttatgagatcaatgcaggctatcctatgccgaaagcaacttttatgggtggagtaaatatcaatttttaataagcatattatatgaaaacaacaactatcagactttattcactggattacagcaatgtgaagacatattttgctgcagctcttttcattttgggtaatctggttttgccacaactttgtcatcttattccacagggtggccttactttgttaccgatttatttctttacgcttattgctgcttataaatacggttggaaagtcggattgctgacagccgtcttttcaccggttttgaaccatctgcttttcggtatgcctcctgcgggagtattgccggccatccttttaaaatccgttttactggcagtggttgccggatatgcagccaatcgttttaaacgtatctctattcctgttttagcattagtagtactggcttatcagtttatcgggacgctgggcgagtgggcaatggtaggtaaccttgcgcttgctttccaggatttccgcatcggcataccgggaatgggattacagattctcggcggttatttgtttatcaagtatttggtttataaatgatattccataaaataaaagtatgttacgaaaaatcagactaacgtttgccatattctttttcgtgctgatcacgcttttgttcttcgattttacgggaacgttgcatgcttggttcggttggatggctaaaattcagtttttgcctgctttattggcactgaatgtcggggttgtgataatcctgatagcattgacactgctttttgggcgcgtgtattgttctgtaatctgtccgttgggtgtatttcaggatgtagtttcatggttgggtaaaaagcggaaaaggaatcgctattcgtattcacctgcacttaattggttgcgttacggagtgctgggagtatttattttggctctgataggaggagttggttcattggtcgccttattggcaccttatagttcgtacggacgaatagcttctaatctgtttgctccggtttatcagtggggaaacaacctgcttgctcttttggccgaacgggcagatagctatatgttttattctgtagacgtctggatgaaggctatgggaacttttgtgatagctgttctgacatttgttattctggctgtgctggcttggcgcaacgggcgtacatattgcaatacaatatgtccggtaggaacagtattgggattcttttcacgtttttctttgctgaaaccggtaatcgatacgagtaaatgtaatggttgcggtttgtgcgcacgtaattgtaaggcggcatgcattgattctaaaaatcataaaatagattatagccgctgtgtggcttgtatggattgcatcggtaaatgtaaaaaaggagctatccgttatgagcgtcctcataaggaagtgcagaaaccgttagcagctgaaaaagtgacaggtgtttcatcggagcaggtggacaatgcacgccgtgctttcttttctgccggtgccgtatttgctgcaagtacattgctgaaggcacaggagaaaaaagtggatggtggattggctgtcattgaggataagaaaataccggagcggacgacacctattgtaccggcaggttcgttgagtattcgtaattttgcgcagcattgtacggcttgccagttttgtgtatcagtatgccctaatcaggttttacgcccatccggtaatctgatgacgttgatgcagccggagatgtcatacgaacgtggttattgtcgtccggaatgcgcgaagtgtgccgaagtatgtccgacggatgcgattcatcttaccagtctggctgataaatcatctatccagatcggtcatgccgtatggatcaggaagaattgtgtaccgttgaccgatggagtaaattgcggtaattgcgcccgtcattgcccggtagcagcgatagagatggttccgtctgaggtagataatccggattctccaaagattccggttgtcaatgtagagcgttgtatcggttgtggtgcctgtgagaatctttgtccggcacgtcctttcagtgctatctatgtggagggacatgagagacatcgggtgatatagaggtggtaatgtgatagggtgataaagtgataaatgttagaagaacagatatggaagaacataataaaaatataaaccgtagggattttctgaaaattgtgggcatcagtgccgctacgacaacggctgctgcgactctttatagttgcaaacagaaggatggggtgattccgggaggcagtgcatcgactccggtgcctactgataagatgacttaccgcacttctgtggctcagaaagatcgtgtttcacttctagggtatggctgtatgcgctggccgactgttccttcaccggatgggaaaggagatatgattgaccaggatgctgtgaacgagttagtagattatgccattgcgcacggcgtgaattatttcgatacatctccggtatatgtacagggatggtcggaaaaatctactggtattgcattaaaacgtcatccgcgtgagaaactgtttattgctacaaagttatccaactttagtaattatagccgtgaaaactccatagccatgtatcgtaaatctttcgaagatttgcagacagattatatcgattactatttgttgcactctatcggtaatggtggaatagaagcattcaaagcgcgatatatagacaatggcatgatggagtttctgttgaaagaacgtgaggcagggcgtatccgtaatctgggattttctttccacggcacagtggatacttatgactatgcactttctctgcatgatgaggtgaaatgggactttgtacagatacagctcaattatgtggactggaaacattcttcgggacgtaatgtaaatgcggactacctatatgatgaattggtaaaacgtaatattccggcaatcattatggagccattgctggggggaagattgtctaatgtaccgactcatattatgacacgtcttaagcagcgccgtccggaagatagtgtggcttcgtgggctttccgttttgcaggctcaccggaactggtgttaacggtattgagtggcatgacgtatatggagcatcttcaggataatatccgtacctactctccactgattcctttgacagatgatgataaggagtttttggaagaaacggcacaattgatgttgaagtaccctactgtaccgtgcaatgactgtaaatactgtatgccttgtccgtatggcattgatattcctgctgtgcttatacattataataaatgtgtgaatgaggggaatgtaccgaagagccaacaagacgagaattatagaaaggcacgccaagcttttcttgttggttatgaccgtagtgtgccacgcctgcgacaggcaaatcattgtattggttgcgatcaatgttcgcctcactgcccgcagagtattaatattcccagagagttgcgccgtatcgatgggttcgtggagcaactgaaacaaggaacattgtaagagttacaaaagctacgagctacaaaagttacgagctacgagtggctgcgctatgtttgcgggcgaaaaatcacttgcacggctatcactccgaaaggtacttgtagctcgtagctaataaactaatttagaatgagcaaaaataaaaaacagatgtggctttggattgtgttggcggttataggcataatatgcgcttccgtatttatttttattaatcagccgagtttcggcagtttgcctcagggagcgcgtttagagcgaatcaaacgctcacctcattaccgtgacggccagttcaataatctgcatccgacgcagatgatgacttcggacgaaggacgctttggtgctatgctttctttcttattccgcaaaacagagaacctgcgtccggagaatgaagttccggttatcaaaacggatttgcataagttggggcgtgatgaaaatgtactgatctggtttggacattcttcctactttattcaggtagatggaaagcgatttctcgttgatcctgttttttgcatggcttcgcctgtatctttcgtcaacaaaccatttaaaggaactgatgtctataaaccggaagatatgccggatatcgattatctggtgatttcgcatgatcattgggatcacttggattaccagacagtgaaaagtctgaaagaccgggtaggaaaagtgatttgcggactcggcgttggcgaacatttcgaatattggggatatgataaagatcggcttgtagaattggactggtatgaagatgctgttttggaaaatggttttgctgtccattgtcttccgacacgtcatttctccggccgtggtttaaaggccaatcagacattgtgggcatcctttctgatagaaactccatcacagaaaatatatatggccggtgacggtggttatgactctcactttgaggaaatagggaagcgttttccggatatagaccttgcgattctggaaaatggccagtataatgaaggttggaaatatattcatctgatgccttctaatatggcaaaggcagctaaagatctgaaagcaaaaaaaataatgactgtacatcattcaaagtacgcattggcaaagcatccttggaatgagcctttgacgaatgagaagaagatgcaggaacaagactcgctgaatatggtgattcctgagataggggaggtaatgccgttatagaattttcatctctgtaataatagtgagtggctgatatgattgttatgtaaaggcagtcatatcagcttttttgttttttcctatcccaaaatagtagactttttgagtattggtgtaactttgtcagcagatattaaaaacattctaaatacgaatcttatgaaacaagaagtcttattcctgcttttaaatgaatatgccgactgggaaggcgctttccttgccatttccctaaataccggggtaataccgggcagtgaagtgaaatatataccgaaggtagttgcccctacattggatgttgtgcgttctgtcggcggttttcgtactttgcctgattatagttttcaaacgatgcctgctgactatgcggcattggtattggttggtggtatgcactggcaatcgcctgaagcagaacaggttgtgccaattgtgcaggatgcattacagcgtggcaagatagttggagctatttgcaatgcttctgcctttatggaagcgcatggtttcctgaatgatgtaaagcataccagtaatacgcttccatatctgaagcagtttgcaggtagtgcatataccaatgaagccgggtaccaggaaaaacaggcagtcagcgataagaatatcgtaactgctaacggaaccgggcatttggagtttacccgtgaattattacttcttttggatgctgatactccggaaaagattgatgccgcttatgattattataaaaatggctttgtgaggtaacatttgtcttgtaattaatcatattcctcaatcacattacggaatatatctactccgacgatttctctcgttgagacatctgtgacccatagccggttgttatgaaccaacaacttctgtccgcctttgaatgtatagccgggcactgatttgaaggtcaggaagaatttctttttctctctgtcatagcatcggatactaccgtcggctgctgagatgtacatcagatttttgtataaggctattcctctgggattaaattccagaggaagcgtctgactggtagtcattgtgatattgcttcccttctggataagggtagtatcgatcacatgtattttccggttgccgtattgtccgtaatcggcgagaaataccaatccggttgtatctactgccatctggtgcggataaaatccgttgtttacatcgaaaccatccagacttccacgtgagtagtaatttatattctgatatttctccgcactcacatcactttgtaaggttacttgcagaccatctttcatgcgcactattatgtaatcgtccacaatagccattgcatgggtgtgaaacaactgtgtatttccatgcccccagttacggtttccaattcgggtgataaatttcagtgtatgtatatcgaacacatcgatgcacgagcctatattggcgagataaagcctctcattagctacggaaatggcctctacataattgttgaatgtttgcgttgcaccattgtaggtccatgtatttaatgaacctattttctgatgagcggacaggctatataattccacactgaaatgtccgctttgagtattggctatgaagagagtatcaccgtatatatatgtactgccgggcatgaattcaccggaagcatatccgagtttttctgcattaatcacctctccggctttgtaagagtagtaataatgtatggatgaaggctgttccggttccacttccctgattacgtcttctattttcttcttttcgcatgagagcaggcataaacctgctaatagtatatatattatcttcatttcttttttcttacttcaattcatttaatgggatgcttgtcactgtacctgttccgcggtttatcacaaagagagtctggcgggccagggctattttctccggattgctaaaagactttccgtttatggtagaatagtcttttaagatgcttccatcctggggattgatctctacaagacattctgtcttttgatttaaagtcacaaacatacgaccgtcccaggaaactacatcataggcttgcgttggtaacttcagggtgcggaccgggtttaatactttctgttcacgcatggtagtaaggtcataggcatagatttcctttttaccaatgtgggtggtataaagtatattgtctttatctatcgtcattccgtatgttcccatcacttcgcctacattgttgaaacggcagtagttcggtatgcgcatacaattatccgctgtgacatctttttccataaagacgcaaacacgccttttatcacggatgaatacacaaccgttttttactaaagtttcgaaagcatgtacggtttgatagctgccttcaccccattgtccgtttccgatacatgttataaatttcagtgtcgtggcatcaaaaacatctgtccggctactcgtattggttacatatattttgccatgggcggctgtaattccattgggttcaccggcaaaagtttcggatgtgccgttgcgtgtccagtttctgatacgtccacaatggattacttgcccgttcttctcttggaagacttctatactatagtttccggtagcattattaactatgtaaatgcgattctgataggctgtaacatctttaggtttgaaagtcgtttccgtagcttcgggcacgtccgaccattttaatgacaccgataatggggtaccgtctgcaatgttttcgttgtcttctactggatgaaaaccgaggccgccgtctattgcatccagttccggatcttctatgacgaatgtggaacctacgtatttagaactgccgtatagggtagttgcatttttacgggtatgcataaaacgccgtgagtaaacagggagacgtttctcctgacctaacttcagatagacagcacgtcccagggtgatccatccgggacctgtctgctcataggtcatgttaccgtcgtgcccgtatccgaggcaatgccctatttcgtggaagacggtatgtatgttgtattcatcatcgggataatgctgtagaaagcaccattctgccagacctaaagtgtagcctccacccaaaccgtttacaccactgacgtgtccgagaaggtatgcgccgtggtttagtactttctgcttcaattgatcgacattgatgactgtcttattattatcgctatgtagctttcctctgtatttctccagttcgtctgcgaattcctgtgaagagaatgcgtatgccaggtttaacatcagagccacgccttcccgacaatgggcagggcgtatcggataagcccagcttccttggcggctataggcagagaaagaaactttgtactgaggtattacatcggtcattttcttataaagcggatcttcacagtcgatgcgtaaagtcaaatctgccgcactgatatggggattagctttgatcacgattgtttttccggaagcagtggtgtattccttgtctccggaaattatgggaagcgctttatgaaattcaatgaagccgggtaccgtaagttgttggcctttattagtgtaatatgccgggctttgatgtagacgatagggtatatcgggctatattccttttttatgttaaaacgaaagattctattaaactttttgcttttcctgttgtcttataaacatcaagattcaataggtataaataaaatatagtatggtattagttttatgaaacgggcggaacattttcgcccgtttttatttcttttgcttttcccttgcatttttgcctccctttttgttcctttgttcccgttaattgtaaacaaatggtagaatgagaaacgtattttacttctggatatgtatagcgatgtggctgttgtcagcttgttcttctcagaaaaaagaggataggggagatatacaggtactgatgaaagacagtgtggatgccaatggtttgcaacgtatgcaggtatctgatagtaagaccagttttacgtataaaggtaaggaatatcaatcgagcgtggttcgcaggccggatgacagtttacctgttgtgattaatgaacaaggagataaatttgttgataacagcattactctgcgtataacttccggcggcaagtctattgttgacaaggtgtttacaaaagagagttttgcttcgttagtggatgcaaagttcatgaaacattctatccttgagggactggtgtatgataagaccacacctcaggggatcgtttatgcggcaagtgtgtgctatccgcagtccgacctttacattccactatcgatcactgtatctgccgatggcaaaatatccttggcgaaagaagaattgctggaagatttgcacgaaacagacagcatttgatcaaagattccagattgtttcctaatttatgagtttcctttgccggtatgaaaatcctgattgtagaagatgaaccggatttgcgggaaacgatccgcatttcccttgtaaaagagcattttgttgtggaaactgctgccgattacttttcggcactggataaagtgaatgactacgattatgactgtatcctgctggacattatgctgcccggtggaagcggtctggatttgctgcgcgaactcaaacgcctgcgtcgtagtgacagtgtgttgattatttctgccaaggattctttggatgataaggtggaagggctggaattgggtgctgatgactatcttacgaagcctttccatttggccgaactcaatgcgcgggtgaagtctgttattcgccgccgacaagcaaagggtgatgtttccattacaatgggaaatctgttgctgtatcctgacaagcgccaggtagaggtaggaggagtgcctttacaacttaaccggaaagaattcgatctgctttattattttatagtcaatcctgatcgcgttattaataaaatgagtcttgcggagtctgtgtggggagataatatcgaccaggtagattcattggatttcatttactcacaagtgaaaaatcttcgtcgtaaactgaaacaagctgaggctaccgtagaactgaaggcagtatatggttttggctataaactctctgaagtatgaaactgcttcattatacctatcggaaactctcattgctgctattgctgttgatggcggtatggggggtattgttttattatgccattattgacgaagtgatggatgaaacggatgatacgcttgaaaattacagtgagatattaatcaataatgccttgatggacccgtctattcttgatacggaggggacattgatgtctttctacaaattccggcctatatccgaagaagaagctgaggactatgatgaagagttttatgactctactgtctatatagaaagcgaagatgaagatgagccggtgagggtactaaagacggctttccgtatgccggatgggcagttttatgaactggaactgatgatttccatcttggagcgtgatgatatggtggaggctatcctgtggtatttgggagcattgtttctgttgtttttgatttgcacatccatcgggacacgactgatactgcaaaatgtatttcgcccgttgcatcgcctgctgaactggctgcaacaaattcagccgggcaaggagcttccggtgttggacaacccgacgaagatacgggaatttcagcagttgggtgatgcggctgtggatatgggaaaccgtagttataaggcgtatgaggaacagaagcagtttatagaaaatgcttcgcatgagttgcagacaccgcttgccattgttcgtggcaagattgagttgcttgcggagaatgagtcgatgacggaagaacagttgaaagaactggatgaaatatatactacattgggcagagctgtcagactgaataaatctttgttgttgctttcccgtattgaaaacggacaatataccgaaacagaagatgtttcggtagatgaagtcttggatgaactattgcctgatttgatggatatatatgaaggcaagaaaatacatctggtacgtacgaaagagacggaacctttcgtgattcgctgcaacctttccctggcacagattttggtttccaatttggtgaaaaattctttggtgcataatcgtgaaggcggtgaactgcatatagcgactacgccttcttctcttactatcatgaacagtggtgaacatccgttggatggagaaaagttgttccgacgtttttatcgcagtattgacgggaagaaggattctaccggtttggggcttgccatcgcccgttccattgctttgtccgcctctctcagtctgacttataaatggcaggaaggaatgcatttgttcttgcttgttaaagaatctcaaaagaaaagctaaaggcgaatattcccaaatctttcccgattcagtatcgttatttgcagtgtgaataaaaacaggaaataaattagtaacacttaaaaacaataacgattatgaagaaagttttatctattctcgtattggctatcgtagccgttcagttcgcttttgccggtgatgtgattaccaaagacgtaaaggaacttccattgactgcacgtaactttatcaatcagtatttcagtaaaccgcagatttcatacatcaagatagacagtgagttcctgtccaagaagtatgaagtgacactgactgaccgcacggagattgacttcgacaagaaaggtaattggacggaagtagactgtaaaaagaatgctgtgcctgccgcccttatcccagcctctgtaaaagattacgtaaaggctaatttccctaatgaaattatcactaagatagagcgtaaaagtacggggattgaggtggaacttgccaatgatttctctttgaaattcaataagaaaggacagtttgtcagtttggatgactaatggagggagaaaatgatgaaaacaagattcttgatgttagcgatgatgatgtgcatgaccgcattgacattcagtgcatgcagcgatgatgatggcgatgataagagtatcgatgtgccggaggctgtaacacaggctttgaagcagaaatatccaaatgctacggacgtagactggaagcagaaaaactcgtattttgtggccgattgctggctggacggaaaagattccgatatatggtttgatgccaatggaaactggtggatgacagaatcggaaatatactggaatgatgttcccggagctgtccagactgcatttaataatagcgaatatgcaaactgggtacaagatgattattattttttgctgtatccgttgcaacccatgcaatatgtgattgaagtgaagcaggggaatcagaagtatcagttattctattcggaagatggagggctgatgaatactgtgaatgtaacgggaaaggatgatacgatttatccaccggaagagtgagaaagctacaagctacgagctacaagagtcctgcggcttgatagcgtttagcagttcaaggactgacatagcgcagcaacttgtaactcgtagcttgtaactcgattacattggtcggtaatcttttgccaatcccccttcactggtttctttatagagtgaaggcaggtcgtttccggtttctttcattacttctacaaccttatcgaaagatacacggtgcattccatcggtgaatgaggaataaaggttggcatccagtgcacgggcggcggcataggcatttcgttcgatacaggggatctgtactaatccgcaaaccgggtcacaggtcattcccagatgatgctctaatcccatttcagctgcatattctatttgagccggactgccaccgaataattgattggcagcggctgaggccatagcacaagctacccccacttctccctgacatccaacttccgctcccgatatggatgcgtttgtctttacaatgtttcctacaagaccggcagtggcaagtgcgcggaggatgcggatatcgctgaaatcgcggctctttgccaaatgatataacactgccggcattacaccgcaggaaccgcaggtaggtgcagtaactatggttccgcctgaagcgttctcttcacttacggcaagggcataggcaaataccagtccacgggattgcagggattgtttgtatccgctggcgcgtatataataagtagaggctttgcgacgcaggttcaatggaccgggcaatacgccttcctgttccagtccgcggcgaacggctgcctgcatggttttccaaacttcttgcaagtaatcccagatatcttcttcctcacattccttaacgtattcccaataactttttccggttttttcgcaccattgcagaatctcagtcatgtggttcatagagtagatatcaggagtgttgacggaagatgcaccatcgttttcttcggctaaagcaccaccgcccacgctaaatactgtccatgaatctgtttcattgcctgatgcatctacagaaacgaacttcatcccgttgggatgaaaaggcaggaatatttttggttcccagatgatttctaccggagcggcaggttgcagggtatcggttatggctatattagtcatatgccctttaccggtggcggcaaggctaccgtataaagtaactttaaatgaggaggcttccggatgtttttccagaaatagctcggcagctttgcgagggcccattgtatggctacttgatggccctgtaccgatacggtagagttctttgattgatttcatactattttatttataggtcaacaactgtaattcctgcaccgccgaattgcacatgctcatcggcaaagtgtctgataccgggaactgtttgcaggtactggcgaataagtgtacgtaaaatgcccgtgcctgttccgtgaagaatacgtacgcgggacatcccaacaagaatggcatcgtcaataaagtaggtcactgcctgcaaagcttcatcaccccgcataccgcgtacgtcgatgtcttgtttgaagttcagtttcttttcgtacatactgtcctgcgtctggttgctgacgaatgtgctcttggtagaactgtctaccttttgcggaacaatgtttgtacgctccagacgttccactttaatggtagtctttatactaccgaatgctacaacggcattttttccatttacttccaggacttcgcctactgaattctgtccttttatcttcaccatcgctcccggtgcaatgcttgccaggtgctctgcttcctgcttggctttttgcgcagcctgctcctgtgctgataatccgttatcagtatcttttgttttcttttctttcttacgattctgcttttcctgcaatttctgcattttacgggctattttctcctcctgttctttagaggcaagagcttccatcgattgacggaattccgtcaactcttggcgtgcctggcgagtcttttctttttcagcctgtgcttccttaatggtacggatggtattctcaattcgggcattggcctcttgtaccagttgttctgcttcttccttggcttttttaataatctccttgcgagatttttgtaagtcttccatttctgcctgataacgggcgatggtgtcttccatatgtttctcgcgttggcggatggtctggcgtttgccttcccaatatcgcttgtcacgtacaatgtcttgcaggtatttatcagcattgatgtattcactgcccacaatttcggatgcgtcagcaatcacatcttccggaagaccgatctttctggctatttctacggcaaatgaacttccggggttaccgatctgaagttggaataaggcctgcatcaggtggcggtcatatagcatagctccatttactaccccctcatggtcttcggcaaagtgcttcagattctggtagtgtgtagtaataacaccgaaagttaacttttggttgaaacgttttagtacggcttcggctatggcaccaccgatttgcggttctgttccgccgccgaattcatcgatcaggatgaggctgcgttcattgcagttcttcatcattatcttcatattggtaagatgagaagaataggtactcaaatcatcttcaatggattgctcgtcacctatatcaatgaatatgctgctgaaaatacccgcatggctgcgttcatgcatgggaatgagcataccacattgcagcatatactgtaataaccctactgttttgagacaaacggacttaccaccggcgtttggaccggatataatcaatatgcgctgtttctcggttagttctatatcgaggggaactacctttttcccatgtttggagagggagagttgtagtaacggatggactgccatggtccaatccagtaagcgtgtattctcaagtgcgggttttataccggatatttgcagggcaaacaaactcttggcacggataaagtctatctcggcaaggaattcgtaagactgcaatacctcgggaatagaaggacgcagcagattggagaattccaccagaatacggataatctctctacgctcatctccctccagttcacggatacgattgttggcttccactacctcggcaggttctatgaacacggtttttccacttgccgattcatcatgcacgataccttttatcttccgtttcagccccggagcaaccggaattaccaaacgtccgtcacgcatagtaggagtaacatctttgtctaccacaccttcggattgggcgttgcgcaggataccattcaatgaacgggaaatactgttcatggtgtttgtcaattcccggcgaatacgtgccagttcggatgaagcattgtcttttatctttccgtacggtgaaagtatattatttatcttctggatcaattgcgggaatgccaggatatctttggcgagattccgaaggcaagggtagggggaatcttcttcctccatatcttctttttccagaaagcgtacgatgtcccgtatcgtttccagcgaacggcgtaagtcgaaaagttcctgttcgtccagatacattccttcaacgcgtatccgtttgagggatggacggacgtcgaaaaaatactgtgcggggaagttgtcttcttcctgtataatgcgtacaaattcagtcacgaggttcaggcgctcctccacttcctcaaagtgatcggagaatgccatatcggtaactcgttcggcgcctagcgtactaaggcatttttcacttagtaactggcgtatttggtcgaaacctattttatattcaaagttctgcgggtatatcatgttgcaaaagtacgatttattcgtgaaaaaaatagcaggaagtttgtagatttaaaaatgatttgtacctttgcaccgctttaagagaaaagcacttcttgaaagaggagtttggagaggtggcagagtggtcgattgcggcggtcttgaaaaccgttgtactgcgaggtacccggggttcgaatccctgtctctccgcaacaaacgctgaaaatcagcagattgcaaaacaaacacccagttttacacccaagaatgtaaagtcggtgtttttgttttatttaagataatacaaccactacataataaaagagtagcgatattaaaagaatccgatgagaaaagactaatatttatctatccattcagtttgatttttcaggactttacatcgtcctgaaagtatttgttattgtattccaacgtcaggagtggattataatacaagttttttgtgtggatagaatttcgttttgcttaatgtacgaaagtacttatctataaacgcatgaaatattagcacaatgaatcattggaaatcaactttggccgtgataggaataggccaactcatatctattttaacaagtacgattgttggcttctccattattttttggattagcaacgaatttaaatccccgacagctttatctctggctattttagctggatttttaccacaatttgtattaggcttgtttgccggggtctatgttgacagatggaatcgaaagaaaacgatgttttattcggacttgttcatcgcgttctgtaccctatgtctttttattgtgataaccaagggttataaagacctttcttttttttatctattgactgcttgtcgttcaataggcagtacgtttcatgcacctgctttacaggcaagcatccctctactggttcccaagcaccatcttgtcagggtatcaggtttgtaccattccattcaatccttcagtgaggtgatagctcccgttgtaggggcaagcctcgttgtttggcttcccatacagtatattctgctcatagatgtgatcggagctgttgctgcttgtctgaccttactttgtgtccagattccttctcttcaaaaaacgaaagttcttccagatttcaaaaaagaactgacggaatgttggcataccttgcggcgtacaatgggcattttgcctttattcgtatgctttacgctggtgacttttgtccttatgcctgtttttacgttatttccttttatgacgcttctgcatttcaacggaaacattttgcaaatgggagttgtggaaatgggttggggctcaggggcattgttgggcggtttagtacttgcctgtaaggctttgaaaagcaagcaaacattagtgatgcatacggcttatgtgatattgggattgtatctgattagcgccagttatttaccatcaagcgcatttataggttttgtttgcctaacatttacaggaggcatagcctattccatttaccatgcgcttttcatcgctattattcagcagaacttggcttcggacatgcttggacggactttttctctcatctttagtttgagtacctttccatcaatgctgggtatcgtagcttcaggatattgggtggaagcatggggtatcacatccgtctttatgatcagcggatgggttatctttctgattggagtgggtgcaaattttatttcttcaatcaagcagttggataattacgcatagtattatttattaaagaattattatatgacaaagaaagaacacactacgattacagagttatttcaagttttggacttgttggaaagcctggacatgcagttttggttggatggaggctggggagtggatgtcttgtacggacagcaaacccgcttgcatagagatattgacattgattttgatgccaattatacagaccaactccttgatcttttgcaggagagaggatatcaaattgaaacaaattggttgcccacccgtgtggaactgtatagcaaagaattaggctatattgatatccatccttttgtcttgaatgcggacggcacttccaaacaagccgacttggatggaggctggtatgaatttcaaccggactattttggaacagcagtctttgaaggcagaagcatcccttgcatttctgcaaaagggcaacaagtattccattcgggctacgatttaagagagaaggatattcacgatttatctataattaaacaatgtataacaacaatgagcctaacaattagataagaacaagaaaatgacagaaaaacaaattgtctggtatatcttacttacagaagtaaagatagacagtgacacccagtctgtcacatccctgagtgtagctccattggcagtcttgccggaattccagcgtaagggaattgggggggggatgttgattcagtaagcccatcagagggcagcacttttgggttacggcacagcagtcgtattggggcataaagagtattatcctcgatttggctatcgcaaggctatcgatttaggaattgaatttcctttcgaagtctctcatgaatattgcatggtggctgaattaatacctggagctactgagaatgtgaaaggtatggtttgttatccaactgactttaaatagtttaacaagtaaaattcattatataactcggactgggtatttcaatttcccagtccgtattctgatagtacttattcaattggaagattgtgttgcttcaagaatgaaagtttatcccaataccctctttgaaagacgattttgttatcttttacatgaaaaaatccgcatccacgaagtccaagagagtctttccattccatgatagcccattcgccatcttcaaaaatattttccaccatacaaaccattttagcagtggcaaattcattcacaaacattttgtagattgattctttacctattattggttcgtttgcgacttgatgatttactgcattagtagcatacagctctgctatatgataagcatctgctttgttaaagcaatctatccatttttccaaaacttctttaggcttcattttttataaattcttaggattttgattctgtaataaaaacaatctgtttggatgcatagatacttgattttattaataataggctattctatattctaaatcctctggatttttgctctctctgcaccgagttacgtagattctgctgtaacttttcccattgttccttaaaccattgtactatgggttgtcggtttatggtcagcataagcttaccactatccatcggatgtttctcaaccctaaaaatatcattcttgatgtcaaatttccacctgtgttcttcggaataaattttgccactacattgtatggattctttctttgtcaagaggttttctatcatgtctttggtaaacccgataacagcgcataatttttccattctcaacatctctttgaacatgggaaaccatttgtgggctttttcaagcaaggtgctcaatcgtgatatttccttgtctttggcttcaagttcttgattatgtattctttgaagattacgaatttgtctgctatgctgttcctgtatttgttgtatctgaatttttaattcatcagtagctttgtcccgtttggtaatttcctgatgtagctgctcgatgtgatgttccagttctttcagcttaccgcttccgaaaagagaacctacaccgcttgctatggcggtagcagcattggtggctgttttctttagtttgtccgtgcgtatctctgcttttacctgtttgagttcctgttcggcaaggcttacttgttgttccttgtgtcgcttggtttcctctatacgttgcagttcggctttctgcttctcaatgatgaaatcatttcgttccagatgctctttacctgtgacagcttttgcctgtccacgttccatcaggagaatatcggaagcaagggtctgcatggttgccatatcctcgtcattgagctttcggctctttccagtttcatggttcatccagtcgaatacgacatgagcatgataatttggtttgaaccatctgttaccgacttggaagctctccttgtcttctgcttccggctgaccgttcagccaatgcccttcgtctttatgcaggaaaatctgtagcggagtgatgccccagcgtctttggcactcttcaccgaatttgcgtacatcagccagtgtggtgtccggtctgataagcaatactccttcacggatgggtgagcatcccgccaccttgataatctttccattctttcccttgcgttccctttccttttcctgcatggcacgtccggtcttttccttgaccatttgcttgatattgtcataatgagttcgcagttcgggagtgccgaagtcgggatttatccactgttcgttatcggtggaaagttcgggaacgacatagattctggactccccgatattacgcatatactcggcagtccttcggttgtgtgcctcgctcgatgcgatgttgcaaggcttgatatgtatgcttgattttgttgccatagcttctttcctttgtttacaattgatttactttgctcgctttcgcagaggggttcttaggggtaacccataagcggagattgcaaagagagggtcactctttgctcggggttctcaggggtgaaacgccctgagtgggtcattagggcaaagccctaatcccctcgggagagcccacaactacgaaagcgaagcgtgtagttatagtgggctataaccggaagcctttcggtttcttggatagcgtatcattcctcttttcgacagattgcgcttgctctttcctatcggctattcgtttctgtaaatattcgttcagatctttacatccactgtagatttgcgaggcgtcacgtatataccgggtagcatcatactcctttcggatttgctgtattgcttccattcctgcacggtcattgtcaaagaaacagtggatgcgctcatagcttcccaacggatagagtgccttgggaacattggctacggaattaagaactatgtaatcctgtctgtcgaagtcgggtgattgcggacagctttccagccttaaagtaagaaaggaaaggtaatccataaatccctcaaaaacgtaacatgtactccttggttttcctgactgtctgatatgggatatttcttttggtgcgatacatcccttgaaatatcggttgcgaatttcatatccgcctgatatgttcggaaaggcaatggcgaaataccgtttgccgttgtgggtgaaacgggcttccttacattctcttttcgccagtgccgtgtttatccctctttcctgtaggtaggcaagcagggcaggagaagccagcagcacaatgtccaattgctgaaaactcggttcggaaaatgattgcttgccaaaagagaaagacacgggacgtatgtgtggtatctgttcttcgattttctgtagaagataaggcacatagtcggaacagtagagttcctgtgccagtgcgatgatatttccacctttgccgattgcgaaatcataccattggttgcgctcggtatttactttgaacgagggttctgtctcttcccgtaacggggatttgtaccataggttaataccttgctgcttgacgggagaatatcccaaactgtacagaaaatccgctatcctgatttgttttgctgtctgtatatccataataagatgagtgtttgaataatggttggaatatttatttctcttttcgcccgtacttttttatgaagtacggtctgtataatcacttcactttatcttcgtatatataggatacggtaataaagtgaagcgcttttctattccctacaaccgcttcgctttattcttaatatatagacctgccgaataaagtgaagtgattacaggttatacggtctaatagtgaaagtccggcttgaacgtgtatttcctgccgttctcctgtactatcatccgtttgttccggagcatggtgataagtgataccgctttttgatggttcagttttacacctaccgacatatatgacttgattaaggaggtttccagatccttgtagccgtattcctctttcagtccgaaagccgcttccagtgctatgcggtgctgctgttcgctaatatgtctgtaagggtcaaacttttcctcttccggtcttccgggtttcttcgcttcgggtctgtacccctctatgagttcaggcaatgcattgtcgttgatacggaaagcgaaaggctcgaaatccattgcacggatgtgcatggctgaaacattgcttatatccccgttgctcttgtccttttccaccagcagaacggtttccgccttgttgttcagctccgtaccgatatgccctcttgcgttttcatcgcctttgttctggtggagtatcgtatggatgtgtatctgcctgtcatccgtccactgcatcagtttggatataatgcgtgtcgattctcccggactgttgatgtcatataccatatcacggatgccgtctatgattacaagccctatgtccggtgtattatagatagcctgttcgacaatcctgatacgctgttcgggcgtgtatttcctcaaagcgagaaactccagatgttcattgtccctgtcatcaggaagaccagcaagccgtaaaatacgtttcatgactttcagacagtgataatggctttgttccgtgtccacataaagaatcttccttttttcttccggtagttccgcaacataccgcagtaccgtaccgtttttcaatgcggcggctacgatagccgatacattgaaagtctttttactcttggctttgccgatggatgcactgaaattgcccagtgtaccaatgaccgaaccttgcacttttagaatctcaggtgctttttcgtagattttcgacagactcaggcgtgaagcttgccaaaggattattgcctgttctgccgaaatctcctttatttctttcatatagtccataagcatacctcccattatttccgtcctcctgttttcttcccggcaagctcaagagccaattccgcatctacgataatcttgcgccctatctgggtaatcgccttgtctatcttaccgcttttctttatgcggttggcagtgggcagactgcacccgaacagtttggctataccgagtattccgtacacatacttcttttccgtgtctgtaacgggttgcggcaatgcttcggcctgacctgaagcgtgcttactcaggaatatgaattcttcgcctgtcatctgccagacgggttttgataataattcttggatatttgtcatcgtccaatctatttagtcgttaaacaatcagccctgcgcactggctgttatttctgttctcgaacgatgcaaaattaggtagggttatgagtggtaaggatggggacggtacaaactgaatatcattgtatcttattgaatatcagaaaataaaaataccactcaaaaattattttgagtggtaaaagtggaactttcgtaaagtatcaggatatattacggattatctgaatatatgttccatttccttggcgaaattttggttgctgtcactggggaaatctgaaacaggctccttgtacttggatttgtagtagctgtcgtcaatatccagcagtttcagtattctgtctttccatttgtccctgtcctgtttggagagtttctcgctcatcaggaatatcagatagcatacacgtattttctctctcggttttattttcagcttacagttgcaggggtgaagattcatattggcatagaaatccagtgcggaaatttcttcgaactgttctcctatgcacacctcatgaatgagcgaaagtaatttcatgctgaaatattcctgttgttcttctgtcgtttcctgctgactgattggctcgcttgatttattctcttgctttccgtcaggaatgtatttcttcaatatatccagaaaaaggcagctttgacggtatatgtccgcacaacagttcttcatgtattggaatgcctctgttcttgcagccttttgctgatcatagagtttgttcagtttggctttttccctgtcatattcagccttgcagcgttcatattctttctctgcctgtttttcctcttcggctgtatgctccctgtaaccaatggaatcatacctgttgttggcttcattcagcggcttgctcagacttcttgtaacatccagctgggcttcaatttcctgagaatacctttccatgtgctgatagcaagcacgttctatggctctgtcacttaacgggcgtatctcataagcctgtatgctcttttctatttcagttttcaggctgttgagtatcaaggtgtattgctctttttgcttgtcaagcaccagttcaaggatagcggcttcaaaggatttcatgtcattatactcctgatagaaatccgatatgaatttctgcctgtcaaaagaaaaagcgtaattatctatatagtctctgtatattctgttgagttctccatattggggaatcatcgtctgtatctttcctgccatatactttatattatgggttcttgtccttgtcaaggaataaggtcagttcttcttccacttcttctatactcggtagggcagatttcagattttcgggtactgccttgctcaattgatagtcgctgatacctatcggctggtcatatccagccaaggcatattgtgccacgacctcatccttacccctgcacagcaaaagaccgatggtcttgttatcattttctcccctcagtttatcatctacaacattgatatagaaatttaactgccctgcatattccggtttgaatggcgttgctttcaattccacgacaacataggcatggagcttgatattatataggatcaggtcggcgaaaaagtcactgtccccaatctggaaatgtttttgtctggcaacaaaagcaaagccgttacccatttccagcaagtaacgggttacatgctttaccaactgttcttctatatccctttcgtcagccttttcctttgctcctgccaagtcaaagatatacgggtcttttaacagataattggcaagatcgctttgaggtgccggaagtgtggcagtgaagttgtttaccttgttactcttgatttgtctgtcatacagattactttcaatctgcattttcagcacattactgctccaacccatttctacagattgtttcatataccaataccttacgcccaatggtagcggattattgagtatgaccatatggcttgcccaatttattcttgcaatcggtgacgccaagaataaatcttctatatcctctatttttattttatagatggttgctactgtttttgctacattctgaaattgcgcaggaacctcctgcgtaatttctaaagattgattatcagctgattgtatttgcgcagtaagctcctgcgtaaattgtccgctattgagcttaaggacttcattagtaatgttttgaatatttgggaccgacagtattgaatctgcttcaataaaactacgaagtacatttaacggatataaacgggcaaactggcacatataagtaagattacgttccgaatatcccttcttttcaggataattgaatctgattgcctgtgccaattttttgataattttaccaccccacccatgtaggtgttggtggtacagtatataattccccattttccagtaatggaacaacatctgggcattggctgcggtaatgagtcggacttgtgcctgttctatttccgaaccgacagcatggacaaaggcatcaaaatgacctttctttatattatgttcgttgttattttccatatcactaactattacttaacaaagataactctaataatggataatctgtgaaactgactgatacttttagagttggttaaacttgttcattgcattggccttaatatcgtctgctatgtcaatgtaaggcttcatggctttataatcactgtgccctgtccatttcattacaacctgtgcaggaataccgagagccagtgcattacagatgaatgtccttcttcctgcatgtgtgctgagtaatgcgtatttcggtgtaacttcatctatacgttcatttcctttgtagtaggtttcacgtataggttcgttaatttctgccagttctcccagttctttcagataatcattcattttctgattgctgataacaggcaatgccatgtggttttcaaaatggatgtccttgtatttttcaagtatggctttactgtacttgttcagttcaatactcagactatctgccgttttaacggtggtgacttctatatggtcggacttgacatcacttctctttaggttacgaacatctgaataacgcagactggtaaagcaacagaacaggaaaacatcccggacacgttccagatactgtttgtctttgggtatctgatagtcttttagtctgttcaactcttcccatgtcaggaagattaccttcttgggggtggttttcaatttcggtttgaacgtatcgtatgctatattctggtgatagtctttcttgaagctccatcgcaggaaccatttgaggaatcccatttgtttaccgatggtactgtttctcatgtcttttttgtcacgcaggaaattgatatactcgttcaatccgaactcatcgaaatattcaaaggtcacatcttccttgaactccttgaggtgatttttaacggctgcaaacttttcgtatgtggattcagtccagttattctgattgccgcattcttttacaaattcatcgaacacctcccaaaaacttatctgtgcttcttcctgctgttcttcgttggcattcttcatccgcaggttgaatgcatcctttagttgttgggtagttggcatggtttcctgtacctcaaactccttgaacacattttgaatttcggcatagtatttcagcagatcggcattgatttcagatgcactttgctttaatttgttggtacacccgttctttactcgctgcttgtcggaatcccatttggctacatcgatgcggtaacccgttgtaaactcaatgcgctggcttgcgtatatgacgcgcatacggatggggacattctccacaattggcacaccgttctttttccggctttccaatgcaaaaatgatgtttcgtttgatattcataattgggtgcgtttgaaattctacacccaaatatacacccaatatttggaatagcaaaagatattcagaaagatttagatttactatgtattccaaattgtgtgtgattatcagtaatttgcaattttatgatatttcttgaatgtataggttcgagagcctgtctctccgctaaaagcagctaaataatggctgcttttttattgaaaatacttaccggaatatacaaggagagatgctcgagtggttgaagaggcacgcctggaaagcgtgtatacccctaaagggtatccggggttcgaatccccgtctctccgcaggttgataaaccgtttttattatttctttctactactttccctgatttgcagatttgtcggaatgattacttgtctgactgttctatcccctttgatttggtctattaataaacgacaagccgtttctcccattttataggtctgatgtgatactgccgatagtttcggttctacatagttggcatgttgttcgtctgtataaccgatgatagctatatcttccggaatgcgaaggccgtgacttttaataacttctatggcggcaaaggctaatgtgtcattcatggcaagaatggcatcgggaggttgaggaagggataacaaagcttccgttgctattttgccctcttcataatctattttccgacagattaccagttctttttcaatgggaatatgattgtcacggagagcttccaggtaaccgtgttttcttcttgtcacaatatccaaatggttagctcctcctatgaaagccactcgtttactaccggtatccaataaatgttgggtagccatttgtgccgattgcactccatctgctactaccgaagaaaattggttggtcaggcaaacacggtcgaagaggatgagtggcatattaatatccttcagggcagcaagatgagtataatctgtagtttcttgggacagacaggcaatgataccttctacccgcatattgactaaattctcaatattccttttttcatattcgtaggattcgtgtgaagtggtgatgatgataaagtatccgttgtccactgccatattctctatcccgttcaggatggatgcgaagaaatgggtaacgatatccggtacaacaactccaatgatacgcggggtattctttcgcaggctcatggcaaaaggattgggacggtaattcatttcttttgccagcttcttggctttagcgcaaagctcactgctaatttcagggctgtcttttagtgccctggatacagtgggaatggatacgcctaatgcttgggcgagatcttttaatgaagtatgtttccggtattccatttcttaagtcagctatattagattcatttacaaagaaaacacattcttcgataaaagagggtatggaaggatgttttttttacgtaaaccattacgtattgttttcgcttcttatatgctgtcctgaaattattcttaccctatttttgtcgcatctaaaaacttttaaatttaattagttatgcaataccatgaaatcggaaagacagggatgaaagtatcatctctcagttttggagcttcttctttaggaggggttttccatgatgttaaagagaaagaaggaattgaggctgtgtttactgctgtcgaatcgggcatgaattttatagatgtttccccttattatgggcattataaagcagagactgttttaggaaaggccttgaaagacattccacgtgaccggtattatctttctaccaaggtgggacgttatggaaaagatggtgtcaatacctgggattactctgcaaaacgtgcggtagaaagtgtatatgagagcatggaacgtctgaatatcgactttatcgatttgattaatgtacacgatattgagtttgctgatctgaaccaggttgttaatgagacattgccggcattggtagaattgcgtgaaaaaggagttgtcggacatgtcggaatcactgacttgcaacttgaaaacctgaaatgggtaattgatcactcacccagtggtacggtagaatctatactcaatttctgccattattgcctgtgtgatgacaagctagcggattttcttgattattttgaatcgaaaggaataggcgtgataaatgcctctccgctatccatgggattgttgagtgaacggggcgttcctgcatggcatccagctccagaacctttggtggatgcttgtcgcaaagcaatggaatactgtaaagcaaagaattatcctattgagaaattagctatgcagttctctgttagtaatcctcggattgcgactacattgttcagtacagccaatccgctgaatgtgaaaaagaatgtctcttttattgaagagtcgattgactgggcgctggtgcatgaagtacaggaaattattggggaacagcaacgcgtaagttgggctaattcttaaaatatagctgtctatatggactatacaataattgatgcccatgcccatctatggttgcggcaagatacggtggtggatggatttcccattcgtacactggataatggacgttcgttgtttatgggagaaatccgccaaatggttcctccctttatgatggacggggtgaatagtgcagaagttttcctgtcgaacatggactatgcgcaagtggctgctgctgttattacacaggaatttattgatggtattcagaatgaatatctggcagaagttatttctcgttatcctgatcgcttctttgtttgcggaatgtgtgagttccgtaagcccgggtttctggcacaggcaaaagaactcattgcaagaggtttcaaagctattaaaattccggctcaacgcctgttgcttacagagggacgggtgatgctgaatagtgaggaaatgatgcagatgttccgatatatggaagagcgggatgtgatgctttccatagacttggcggacggagcaacgcaagttcccgagatgcaggaggtcattcaggagtgtccccggttgagaattgctatcgggcatttcggaatggtgacacgtccggattgggaagaacagatacggctggctcttcatcccaatgtgatgattgaatcaggaggaataacctggcttttcaatgatgagttctatccttttaagggagcagtaaaagctatacggaaagctgccgaactggtcgggatgaagaaactgatgtggggatcggattatccgcgtactattaccgcaatcacttacaaaatgtcgtatgattttatagtgaaatcacccgatttgcaagaagatgaaaaaaggctgttccttggagaaaatgcccggaaattctatggatttactgatcttcctgtattgccatatatcaaaaacatgtctgaataagaagataataataccatgaaaaaaaatacttatacgatacctttggcgctggtcttctgcctttttttcctttgggcaattagcagcaatctgctcccgacaatgatacggcagttgatgaaaacctgtgaactgaacacctttgaggcgtcatttaccgaaactgcctattggcttgcttacttcattttcccgattccgatagctatgtttatgaagcgttatagctacaaagcaggcattattttcggtttattgttggcggcattgggtggtttgctctttttcccggctgccatgttgaaagcctattgggcctatctctgcattttctttatcatagctaccggtatgtgtttcttggagactgctgctaatccgtatgttaccgttttgggtgcgcccgaaacagcaccgcgacggttgaatctggcacaatctttcaacggactcggcgcctttatctctgctatgtttctgagtaaactgattctgagtggcacgcattatacacgtgatactttacccgtagattatccgggtggctggcaggcttatatacaagtagagacggatgcaatgaagttcccttatctgatgctggccttgctgttggtgattatagcagtggtgttcatattttccaaattaccgcagataggagatgaaagtaagactccttcttccggttcaaagaaagaaaagttgattgactttggtgtactgaaacattcacacttgcgttggggggtaattgcgcagttcttttataatggcgggcagacagcgattaacagtttattccttgtctattgctgttcttatgcaggacttccggaagaaaccgcaacaactttcttcggactttatatgcttgctttccttgtagggcgctggattggtacaggactgatggtgaaattccgtccgcaggatatgttgttggtttattccttaatgaatattcttttgtgcggagtggtaatgatttggggaggtatggtaggattatatgctatgctggctatctcttttttcatgtctattatgtatcctacccagttctctctggctctgaagggattgggtgaccagacaaaaagtggttcggcttttctcgtgatggctattgtcggtaatgcctgtctccctcagttgacggcttatttcatgcacgccaatgagcacatttattatgcagcttactgcgtaccgatgatttgctttatattctgtgcctactatggctggaaaggttataaggttattgattaaacaattaatttcaaatatataaaatgaaagcagttcaaatagtcaacccctctgaaatgaaggtggttgaacttgaaaaaccggtggttggtgccggtgaggtgttagtgagaattaaatatgtgggtttctgcggttccgatttgaacaccttcctggggcgtaatccgatggtaaaattgcctgtagtgccagggcatgaagtaggtgcggtaattgaagaaataggtccggatgttccggcaggctttgaaaaaggaatgaatgtgactctaaatccatatactaattgtggtaaatgtgcctcgtgccgcaatggtcgtgtcaatgcctgcgaacataatgaaacattgggagtgcagcggaatggcgtgatgtgtgagtatgctgtattgccttggactaaaattattccggcaggtgatatttctccgcgtgattgtgccttgattgagccgatgagtgtgggatttcatgccgtttcgcgcggtcaggtgattgacaatgaatatgtgatggtcatcggttgcggtatgattggtataggtgctattgttcgtgccgctcttagaggtgccattgttattgctgtggacttggatgatgagaagttggagctggctcggagaatgggagcgtctcatacggttaattctaaaacggaagatgtgcatagccggattcaagagattacggaaggttttggagctgatgttgtgattgaagctgtcggtagtcctgtgacttatgtaatggctgtggatgaagttgctttttcagggcgtgtcgtttgcattggttatgcgaaaagtgaagtcgctttccagacgaagtattttgtccagaaagaattggacatacgtggttccagaaatgcattgccggccgactttcgtgcggtcatcaactatatgaaggcaggaacttgcccggtagaagaattaataacgaaggtagcagtatctgaagatgcattggaagctatgacggagtgggcggctaatcctggaaaagtattccgtatccttgtacagttataagagatttcaaggtcttttaaataaggcttttttaaagtaaaagagggtgtattcactgtaggaatgcaccctctccgttttcaatcggtcagtttaggttggtctcttattgtttaatcctattttactattttttcagatctatcgtataggtttgttttccgtcataaatcgtattgacgattatttttaatcctttctttcctgtcaattgcttggctattttatccagtctgaatgatacgattccccaacccggcgtacgttgttcatcgttataggcattgtgccggaattccaaagtgaaatactcgtcttccggatcaggtgtctcggctgtttcatttatgaccaggttcagcatgtgcttcttatctggattattgctgtggaagaactggtgttctatgttcagataatttcccgtaatccataatgaggtagcattgatacggtcattaccgatgctgtcagccgtttcctcggtaagtggaataatatcttttgtcagtatgttctcaagttggataagtttcacattatagtcatagcccgggatatcttcttccaatggaaggaaatgaataaatacacgttggttgttttccactgtgtagttatggatgtaagtagtatcactgggatacatcttatcaccgtcatccagattaaaaaagtattccttttctcctataacttctatagtaccgattgtgaaacgagtaccacgattttcgtcatcatcattcagacaagactgtaacatcggtattattaaaagtgcaaatgtaaatactaccgaataaaatctcagcttcttcatcaattgttgtttttttgggtgttaatcttattttctacatgtattcaaaaaatgcaatgggagggtaaatactgcataaaggactgttaaagaaacaaaagagttaatttcttgctcgctacgtgcagtatttctatctttgccgcatttataaggtaaacacgtgtcaaaggaaagaatggaagaacaggaactggcaggacggtgcaggcaaggcgacaaccttgccaggaaggagctgtacgagcgctatgcagggcggatgctcagcgtgtgtcttcgttatgcgggtgaccgtgatacagcagaagatctcatgcacgatggtttcctgaagctcttcgattcttttgataaattcacttggcgaggtgatggatccttgcgggcgtggatggagcgtgttatggtgaatacggcgctgcaatacttgcgcaagaatgatgtaataaaccagtcggaggggctggacaacgtacccgaaacgtacgaggaacccgatgcttcgacagtggaaactattcctcagaaggtgctgatgcagtttatcagtgaattacctgccggttatcgcaccgtattcaacttatatatatttgaagaaaagtctcataaggaaattgcccagatgctgggtattaatgagaagtcatcggcttcgcagctaacacgtgctaaagctactttggctacaaaagtgcgagagtggatgaagaacaatgcttaatgaaggaaaggacgtatgatgaaagatgatgaattatggttgaaaaagataaaggagcggctggatgattattccgaaccgttgcctgatactggctgggaacggttggagaaggtattgcctgcctccgcacccatgtctgtagggaagaagaaacagatcatgttccgtcgttgggcgatgacggctgcggcagttgtgctggtggctgtatcgtctgttagcttgtggttgctgcaaagtccggtagtggacgaggtgcgtcgtgcggctgaaccggctttggcaacgatacctgatgtattgccggaacagacaaagccggatactcaaggagaacagccggaacctgttatccggcgagtaattgaacaaggggattctcgttatcaaactcttgtagcgcagcatttggaaacagaaagcaatgttcaggaagtaaacgtgaaccggcaagaagaaatagtgaattcagatttgaattcaaatgtgacagaagaaacgggaaaaacggaacaggcaaaggaaacggaaacttcatcttcgattccggaaaagaaagaacgcgaagtatatcgtccttccggcagagataaacttcatttgcctactgaaaagaaatcatctaccggaaataaaggttgggcggttggcatgtctgtaggaaatacaggagcacttgcgacgctggataatgcaaatggtggcatgcagtcaagtccgaattcaactcctatgtttagtgataaactggatttaccgaatgtttccagtggtattctggatattcctgaaggacaggaactggtatttgaaggtggagtaccttatctgcggaaaaatacccgtcaggttaaaaatatcaagcataagcaacctcttagtttcggcttatcggtacgaaaagcattgccgaaaaacttttctgtggaaaccggtgtgacttatacgatgctgtcgtctgaaataacttatgaaaatagttcggaaaaaacagatcagaaactgcactatatcggtattccggtgcgtgcgaactggagtttcgttaatgacaaacgtttcacagtgtatgtatctgctggtggtgcaatagagaagtgtgtctatggtaaggtaggaagcgaaaaggaaacggtgaaacccgtgcaattgtctgtaatgggtgcggtaggtgctcaatataatattagtaatagagtgggaatatatgtagagcccggtgtttcctatttctttgacgatggctctccgatagagactatacgaaaggagaacccgacgaactttacgttgcaggcaggtatccgtctgacttactaatcagtacataaccgtttcctccaaaaggaaatgactatatatgtaacgggtgataacaatatatgtaatgcagtattacattttttgttatcacccgtcccttttattcttatttcttagtttactataaccgtttcaaagtattccttgaataacttttctgcacgttccagttgttcgggagtattttcttttacttctttcaattggtaatcccatcccatagcttcgtacttatgcacgcccaggcgatgataaggaagaatttctacccgctgtatacttttatattggccgagatgttcgcctaaactgcgaatgtcttcctcaaaatcactatatcccggtactaatacatagcgtagccagaaaggtcggttctgttcctccaaccaagctgccgtatgtaaagtttttgtattgctgcatccggtcagcttcttatggcgttcgggattgaattctttgagatccagcagcactaaatccgtcagactcactagttcttcaactttttcattccagatgccgccattggtatccaggcagatgtgaatgccgtttgctttcaaatctttgaacagaggtataagcgcttcggcctgtaatgtaggctcaccacccgagaatgtgatgccacccttttttccgaaaaatactttctggctgatagccatttgcagaatttcttccggtggggtaggtgtccccccttttgcatctattgtatccgggttggcacaatacagacaacggaacggacagccttgcaggaaaacgacgagccggagacccggcccgtcgaatgttcccatactttcgtaggagtgtacgtttatcatattacattctttcgtggaaactacggctgataacttctaactgatgctcgcggctcagtttcacgaagttcacagcatagccggaaacacgaattgtgagttgcggatacttctccggatgttccatggcatcttccaacatttcacggttcagcacgtttacgttcaggtggtgtgcacctttagtaaagtaaccgtccatcattgttaccaggttttcaacacgatcttccggtgtcggaccgagagatttcgggacgatagagaatgtattactgataccgtcctgtgagtcacgataacgcaacttggctacggagctcagtgatgcgatggcaccgttcttatcgcgtccgtgcatcgggttggcacccggggcgaaagctacacctttggcacgtccgtcaggagtagcacctgttttcttaccgtacattacattagaagtaatcgtcagcaatgaaagagtaggacgggcattcttgtaaacgggcaactttttcagttcttcgctgaaataatataccaagtctaccccgaggtggtccacacggtcgtcattattaccgaaacatgggaatgtaccgtcgatatcgaaaccttccgtcaagccgatgtcgttgcgacgggctgtaacctttgcattcttgatggctgacagtgagtcgatggcaatggaaagaccggctacaccataagccagattgatgcgtggattcgtatcgataaatgccatctgagccttttcgtaataatacttatcgtgcatgaagtggatgatgttcattgcttcgttgtagacacgggcaatttcggtcagaactttcttatagttcgacattacttcctcgaacttcaatgtttcaccggtcaatacgggaataccttttaccatgacagtaccggtattttcgcaacgtccgccgttgatggcaagcaacaaggcttttgccaggttggcacgtgccccgaagaactgtatctgcttgccgatagcctgataggatacacaacatgcgataccatagtcgtcacagttacgtacttcgcgcatcaggttatcattttcgtattggatggagctggtgtctacggatacttgtgcgcagaattccttgaaaccttcagggagttcaggcccccaaagtatggtcaggttcggttcgggagaaggaccgaggttatacagtgtttgcaggaagcggaaggaagtctttgttaccttcacacgtccgtcgttgaaacgtccgccaatggcttccgttacccaggtcgggtctccggcaaagatatcgttgtatgactgcatacgcagatggcgtaccatgcggagtttgataacgaactggtcgatcagctcctgggcaaatgtttcattgattttaccgtgtgccaggtcatattcaataaagatgtcgaggaacgaagaaacgttgcccagagacatagctgcaccgtcttgttcttttacagcggccagataagccatgtacacccattgtacagcttcctgtgcggaagtagccgggcgactaagatcgagtccgtaatattcgcccattatcttaatatctttcaaagccttgatctgctctgccacttcttcgcgcaggcgaatacggtcatcagtcatcggaccggtcagattgtgtaaatcttccattttggcttcgatgaggcggtcgataccgtaaagtgccagacgacggtaatcaccgatgatacgtccgcgggcatagttatcggggagtccggtgaggaaacccaatgaacggaatgagcggatctcttcagtatatacgtcgaatacgccgtcattgtgtgtcttgcgataatgggtaaagatatcctttactttatcatctacttctacaccgttttcgcggcaagctttagctactacattgataccaccgaatggtttgatggcacgtttcaatagctcgtctgtctgcaaaccaacgataagttcattctccttatctatatagccagcctgatgtgaagtaatagttgatacagtgtgggggtcgagagaacgtactccgttgttagctctttcttcttcgagtgctttgaggcaaagctcccaaatatgtttggtacgttcggtaggtccttgcaggaaagaagcgtctccagtataaggcgcgatatttttactcacgaaatcactgacattgatttctttgctccaaagcccgtcgataaaggttttgttcaattccataatattcattttgttagtgggtaatggttgttatcctaataaggactgcaaaattactatcttttttccacatagcagtgcatgaatactcggtttttatgttgtacgacataaaataactattgttaggtataggagttatcggtaaagtcggcttttttgtgttcattacctgcactcttttactaatttattggtaaatggtaggttgatagcgaagttgatacttttctgttattttacaaaatatacatatggattatttcaggcatagggctgcgtcaactgcgctgcgattataaaatatcgtagaaataatatttttgtgctgaaatatttgtgatatcaaaaaagaatagtacttttgcatcgctttaagagaaaagcacttcttgaaagagaagtttttggagaggtggcagagtggtcgattgcggcggtcttgaaaaccgttgtactgcgaggtacccggggttcgaatccctgtctctccgctgaactaaccggacaatgaacagccaagtcccacaaattcaacgatttgtgggactttttttatccccttgtgtctgccttgaagtacaccttttcgcccctaaaagacaaagttcgtaacctaactcgtacccccgacaaacaaaaacggaaagggggtacagattgtccgaaattggcgaagtcctgtcgctatttggcttgcctgcatagagctcattttaagagatttacaatggttttgcaacttaaagaagtgaattatgaaatcgacattcagcatttgcttttacgcaaagaaagataagcagaaagccaacggtgcataccccattttcgcccgtatcacagtggacggtgtggcaagccgtttttaatactaagctggacgtgccgcactttatttgggacggtaaaatgggcaaggctaccggacgtacttcggaagccagccgcataaaccgtatgctggatgatataaacgcatctttgaacaccatttaccacgaaatgcaacggcgtgacaattacgtgaccgccgagaaagttaagaacgagttcttggggcatggcgagagccacgaaactatccttatcctgttccaaaagcacaatgacgatgtgaagtagcttgtgggcatatctaagacgatagcgacttaccgcaagtacgaagtcacccgccaccaccttgccgagttcattcaaagcaagtacaacgtatcggacatatccattaaggagattaccccgatgttcattaccgatttcgagttgtacttgcgtgcggcttgcaaatgcggttacaacaccaccgccaagctcatgcagtttttcaagcgtatcatcatagcccgtaacaacggcatattggtaaacgacccgttcgccagttataaaatccggctggagaaagtggataggggttacttgacatttgtcggtacggcagtttccgggtaataccccggtacaagttgtttccagccgcatacttcacggtgtcagtagtttgtgcgtttgccgcatacacacagtaagagggcgagcaatacaaaaatctgtttcattgtcaattaaaatttagtggataaatatttgttgagtaattattgctgtttggcgtaaagcatcaccttgtacccggctttcagcttcactttcacggttcggaactttttggcgaggtagccggacgttccttgcagcaagccccttgtcacgtccatagccacctgctgcccggcattttgggcaaaggaaatgcttgttcccagcccgctgccgatgttcgccatagcttcgttgaacgcttcctgctccattgaggacgggatggacagccccttttgcccgtccgtgtcgaacacggcgtgttccaccgggatgatgttgcccgcatactcaatagaggacaccagtatgtcgagccgctcgccctgcacttttgccgttctagctacaagggtattctttggcacaacgatgttccccgcctgcatgggttcaagcagccggagtttcaccgcctgcccgtctgtcagggtttgggcttggtggatgcaggtggctaccgtgttctttcccatagcgtagcccgtgcctaccgccgtgttgaaaccgtagttgcgtggctggctgtaagcccggataaagtcggcatcgctcatgggctgctatttatatataagattgatatattcatgtagaatacattcttttttattcatttgatagcgttaatcaaaattacttttgtatttttggtcaacttaaaaacttagtaatatgattcaaaagtttacgattaaaaacatcgccacttataataaaaccggagtagaatttgctaatcttcgaaagataaactttatttatggtagtaatgggtgtggaaaaacaaccatcagtaactttttggcatttccgcagaatgaaaattatgcggattgtgaattggcatggaaggatgatatacctttgaaaactttggtatataatcgtcaattcagagaagaaaactttggaaaaggaaatataaatggggtatttacattagggcatgccactaaagaagaacttgaaatcatagagaataagaaaaaaagcttgtctgttttgattgaagaagggaaaaagcaaaggagcagttgggaaaaattaaaaacagacttaaaaactgttcaagaagagtttcgtgataaagcttggcagcaagtttataagaaacatgaacgtaattttaaagaagcttttagaggatatttgtataagcagacttttatggataaactcatagaagaatatgataataattcttctgaacttatcgaattggagtatcttcaagagaaatataaaattgtatttgcaagcaatgtccagtctttacctcttttgcctgttattggtgataatgacataggcactatcgaacaaaatgaaatatggaacaagaaaatagtaggacatgcggatataaatatcggtagccttattcaaaggcttaatattaacgactgggtaaatgaaggtcgtaagtatcttcaagaggatagtctgatatgtcctttttgtcaaaaagaaactatcactgaagagtttaaaaagcaattgcaactctattttgatgaaacttttacagcagactgtcaagcagttcagagatggggagaaaaatatatggctgccagtactgaactaatctcccttttggaaagtatttctgaaaaagagaaacttaattcagtatcaaaattgaacaaggaattgtatgatgccacgttaaaaacattaagtggacaaatgaccataaacaaggaacatatcaacaataaacgcaaggaaccaagcagaagtatcagtttggttcccactacggaggtacaagagaaaataaaggcattggttgttgttgccaatcaagagatttccaaacataatcaggttgttgaaaacttgcatgttgaaaagcaaaagctaattgcccaaatttggaggtatgtgaccgctgaatatcaagataatataaaacagtatttagagaaagagaaaaagattaaggctggtataaatggtctgggagaaaaagtatccaaatcaagagagaattatctggcactggatagtgaaattaagcgattgactcaaaacgtaaccagtgttcaaccatctattgatgaaattaataggatcttgcagctatatggatttaacaacttccaaatagttccatctcccggtcatgaaaaccaatatcaaatacaaagggaagatggtactttggcagaaaacacattaagtgagggagaaataaccttcatcacttttctctatttcatgcaattggcaaaagggggaattgacaaagatagtatgatggaagatagggtgctggttattgacgaccctgtatgcagcttggatagtactgtcctgttcattgtaagttctttgattaaagaaatgataaagcaagtcaaaatcggtgtcgggaatatcaggcaattaatcgtattgacccataatgtttattttcataaagaggtttcttttgtggatggcagaactccaaagaatgggcatacttattactggatactgagaaaagtggataatattacttttgtaaaaggatacgaaatggaaaatccaatagtaagttcttatgaactattgtggaaagaattgaaagaacgtgaccataattccggaataaccatacaaaatacaatgcggcgtatcatagaaaattattttaagattttgggcaaattcggagatgatgaattgattcaaaagtttaccaatcctcaagaacaagaaatatgccgttcattgatttgctggataaatgacggctctcattgtttacctgatgatttatatatagaagctccatttgatactattgacaaatattttgatgtcttccgacaaatatttgaagaaatggggcatattgcgcattataatatgatgatggaagaaagatgaaaaactgcccagtgttcacttttgaatatcgggcagttttttactaatttcacaatatgggtttatcgtctcccccccttcttcttcgcattcgtctgccgtgctttcagcaccgtcttttgtcggtcaataatcgcatttacatggtcgataaatgtggcgtagggagcttcaccgtttaccaccgtcagggcattaaccaactccaccagcgagcgataggcattgtcagccgtttgtcggatttctttcacgatacctacctggcgggcggctgtttcttccgtccgttgcgatacggcggagaggaaagcagtttcgcaggtttccaaatttgtcagccaggcatcgaaggcaagggaagtaagtttgctgctgtcgatggctttcaggtcttgcaaaagattgtgcaagataccgttttcttccgtttgcgggagcgtggtcgggtcgccatacttgtcaaacagcgttttggtttcgatggcggcttggcgcacttggtcggtggggtgggcagtcatggctttcaggaagttgtttgccccgcgccaggcattgtcgcgggcggtgtctgcttcggcggcgatggcggtggaggggggcggagtctttcagggcattgtcgaaggtgttgacggcggcttcaaaacttgctgtggacattgtaagcggggaagatgactttgcggaaagactactgatgacggggcggtcatcctcgtccgtatcgtctttgggcaagttagaggtttcgctaaggattagtttcaagaaaccgaaatcttcctccacgcggagggaagagaggctgatggattttattttcttcatgcttttagaatttgaggtgaaacaatacgaatgtcgtaagtaaagatagagttttcaagtcaagccgcaaatctctgatggtgtttattgagcaaaaaagtgctgtcggagtctcggatagtgcttatcgggcagaaaatgcattgtcggagggggggggacggtgctttttcttgtctggaaggttcagccgagggagttttcgttgatgttacagcctttgttggcgaggtatttattgaaaacgagatttgcaaggagatgagggtgaggatgttgaagaaaagggttatctttgcaatggaataaaccggtcgtatatggatttttagagcaagagtagttttcttatttaacttgcggataaaccagggtttatatttaaatttgcaaaatattgataggatttatatgagtagaaaaatagaattccaaaacataagagaacgattgggggctcacatttactatgcggatgaacaggcaataatattcaatgatgatgccttgaatatactaaaattgatacctgaacattccgcgtcattgatattgacagaccctccttatcatagcactaaaaaaggaaatattgtaaacgacaaagctttttcttcggatgatgagtttatcggatggatggagtgttttgcggtggaatggaaaagaattttgcgacctaatggttctattttcatgtattgttcgtcggctatggaagccaagttggaaatgatgctttccaaatatttcaatgtactttcgcatattgtatggactaaaccgaatgaacctggatttgacggctggaaagggaaaatgaagaaagaggcattgaggcaatggtatccacattcggaaagaattatcttctgcgagcctgcgttggatgggaatttaaaacgctcttattttggtggacttttaaaagaaaagcgaacagcttgcaatctgtctgggcatcagttgacggaaatgatcggggcttatggaaaagtaaatcatggcggtgccgtttcaaattgggaaagtggtagaaatatacccagtaaagaacaatataataaaatttgcgcatcattagagtcttgtggcttgcaagaaccaatgccggattatgaagatgtcataagaccatttgaagttaatgctaatgtggagtttacggatgtttggacctttccctctgtacgtccctataaaggaaagcatccggctgagaagcctttggaaatgttggaacattgtattcgaagcacaacatttgagaatgatattgtacttgattgctttgccggatctggcagtacattagtatctgctttacggacgaaacgtcatacaataggcatagaaatagataaaaagtggtgtgagtctataaaaaaacgattgcaatcttttgctttattaccgactgaaggagtagatggtttcaaagttatgaaaggttgtttacaatctaatgaaatgccaactttgttttgagttggcatttcgtttgttgatgtagattccttatagtgcgtcatttcgtgctataacctctcgcatccattctaatgtggcatctatgccagagtctttcactactacattacaatggtgatgtccccatcctaaattataaggtttgtgattgaattctccggtacgaagctcacgaatgtgaaataaactaacttccgttactgttaggtctggtacatttcgaccttcagcctgctgtattcttgaacaaaatcctcttgcagaaatatgttttaagcatagcgggcaaattgtatatccttctttatcaataattctttctttgattaattggtcttggtcagctaatcctttggactgcgcattatgagtgattttgttaatcctttctttgacaagagcttcatccatattatattctcttatcaattcattgatatctttacatgaccaaaataaatattctaattgaaatttacacatttttattgtttcggcatcagcatattcatagacacggataccagctcctttcatcttggatgtattaaatccacggattattttactctcattttcagatgtcgtagcaggaactctggcaacatattgacctcctaaaggagagttacgtgcggaagcaggtttccacccattcaatggtggaaaattgcgccattgctgtcttgtttcatagaataccagtaaattctttcctaaaacaagtgctttttgtgatagtgattgcttaatcgcttcatcgaaatattcttcagggctaataagaatgatatatccattttcatatataccattttgagttggtgcttttttgcatttttcaaactcatgatatggtattagtacagtactattacgtcctacacgattttgatatatgacatcatcatctgcgccacgtgtttgccctgttttgtatattttagtttggactaatttaggggttattgtcgtcatatcgcttgtatatttaattaaattcttcactattaaagaaatctgccaatgatacctttaaggcacaagctatcttttcaatattgactattgaaatattacgtgcaccattttctacactggctatgtaacttctatctaaatcagcagaataagctaaatccttttgagacatgcctttggactctctgatgaatttgattctttttcctattttattcttaatatccatgttgcaaagtacgttctttgtagattataaatcaaagactataagtaacactataaaatatttaatacttttatcgtaaatgcatatcggtgatttacgatgccgccagccggataagggtgacaaacccgctgtcgttcataatgcgttcaaactgcccgaccgcttcgatgaacttcgccgccacttccctgtccgctatctcctacggtacaatcctgctccggcagagggtggagaagtcgctctgtcggagacttctctcccttgtcgtctttgtcaggaacaggtagcagtagtggttcaggaacgggcgttcattgaagtgccgttcaaaggagcggcttaaaaaacttagttcgtccctttcggtgtcgggctggtagttttctttgatgaagaagtcctgcttgtgtactatggagtagttgggcagcaccttgattgccttgtaccatgccgaatgtatggtttcgtactcggcactggtgacggtgaacagtttgggcagtttcacctggaaagccaccgtgatgtcggcatcctttgaaatgatgcagccgttctccaccacccaaaggggaaaattcctctccagcgtgatcgcctttaacatattcctcatggtctttcttcctttctttttttgtaggtgaataattggggtatcgcctttcggctgataatgaagcgtgggtgtcttttgcgggcggctgctttcatcagcccgtgcgtgccgtactaaggcttgaaacagtggtattgaaaattgtgctagctattccaaaggctattcatcgttttttgaatgataaagaaccggaggaaagtccgcttcccccggtaatagatagaatacatcagggagataagaaaaatgtactcgtcataatgagtgcaggaaccaggctaggtaatacggaccggctggcagatgcttatatcaaaggattggtagaacgagggcattctgttacaaaagtttatctgggtagtatgaagatagaaggttgtaggggctgtggagcgtgtcagcgttttgcccaccgatgtgcaatccgggataatatgcaggatatataccctttatttgctgagtgtgacactgtggtaatggcttcacctctgtatctctggacaataacatcaaagttgaaggctttcattgaaaggctctatgctatttctactgatgataaatatccgcaaaaagacttcgtgctactaatgactgccggtgatgataatgatacaacctttgaacaacctaaacggtatttccatcttctaaaccaggctttaggctggaatgaagtcagtgtatattgtgctggcggttgtaccggctgcgaagaactggcacggcagataggcaaggagcatcttgaaaatgcttatcaaatgggattgaatttatgaaaaacataaacgcatactaatatttgaatcggttatgttggtataatctttgagaaaataatcgctgcaagcagtgaaacacacttcaaaagttgtatgcaaaacttttgaggtgcgcttcattggactgtttctttttaagcgccaatccttccggtagtatctcaataggcaagattgctattgtcgtaatcaaagtttttctaacagtttgatcagttttttagcatgttctacagattttaccttttgttgttctatcaattccggtgttgtacgcgtgccgtaacttacgccaccagtatagatatatcccgcaaattccatttggcaaagattacatgtagctttgtagcaaggtaagaactcttcaatcgtataccccattgcccctttgtgagaatacatttcttgtggggcaccggtggtaaatgagagtatcatctttttgcctttcagtttgttgccggtactgccatgagagaagccgtgccggaatgtttcttccatccagcgttccagtatggagggtgcgctgtaccagaagattggaaattgcaacacgataatgtcggctttcagcaggcgttgttgctctgcgtcaacatcaattttaaagtcgggataaagggtatcaagctttacaatttcggtttcgggaaggtattgcccgattgtatcaagaatcgttttgttagctaccgaagtagcaaggtctgtatgaccggatattacaagtacttttttcatgcttcaatagatcatttaaaatattctatacttcaatttgtaaccttaatctttttctgatgcaaagatacggcagttgactgtatatgtaattagatacattacggattaaaataccatttttacagatttttatttagacgttcaaatggctgatgcttactaaaaagaatgttgattcacagagaaaaaagggtaattcatctattttagtttctattattttttcaaatttatatatttgcaataagcaaacaggcaatatcatcatcaaaagcagggatataaaaaattatttggaatagctttttatagaaactgattatgaagaaaattagtcttataacaggattagcatccgtgtttatgtgccttcttttcatggggctccgggatataggtcgttatccggagaaaatatggcttcatcgttgcaattctttggaaaaattgtacgagaaacagagtcgatatccgaatgtagaggttgatctcgtctttcggaaagaccgtgtatttgatgtaacgcatgatgtagatacaagttttaatctgagtttgggttcctatttttcttatatgaaagatcatgaaggaaaaatgtggctggatataaagaacctgaccgctggaaataaacatgtagcactagagagaatgaatgagatgacggaatatttccagattgcaaaagaccgtttgattatagaaggcaaagattggaaagctttggaagttttcactcaagacggttattatacttcgtattatgtaacttatgatgaaccggatgatttgagtgaagaagaagtggatgattgcatcgaagaattacaggaaattgcggataaagaggtggttagggctctctcatttccgggatattggtatactgagataaaagaaggtttgaaccgttccatagatttactgacctggaaacacaggagtagccagttgcagttcttgttgtcttctgtcggacgtgagatgttggccgatccacaactgaaagtagtattggtaaaagaaaaagggcggtttcatagatgatcattcggatattgacttgctctgagagaaacaatcgtttttcagcttcgcgataaaacaatcgacaaggaaaactgtttatttagtatgattctaaattaaaaaacgaatatattatgagtaaaacagttgatttgttgggacaacaggcagaatattacctgaaccatacgtgtaagacaatagataagaaattaattcatgttcctggacctgatgtgattgataaaatctgggtggactccgacagaaatgtacgtacccttaatagcttgcaagctttgtacggacatggacgccttgcgaataccgggtatgtatccattctgccggtcgaccaggatatagaacatacagccggagcatcattcgctcctaatccgatctattttgatcctgaaaatatagtgaaactggcaatcgaaggaggttgtaatgcagttgcgtccacatttggtatattaggggctgttgcccgtaaatatgcccataagatacctttcgttgtaaaactgaaccataatgaactgctgacttatccaaactcttacgatcaggtgatgtttggaactgtgaaggaagcatggaatatgggtgcggtagctgttggcgccactatttatttcggttcggagcaaagtcgtcgtcagattattgagatatcacaagcttttgaatatgctcatgagttaggtatggcaaccattctctggtgttatctcagaaacaatgattttaagaaagatggcacagattatcatgcggcagccgaccttaccggacaggccaaccacatcggagtgaccatcaaggctgatattgtaaaacaaaaacttccgtccaataatggcggattcacagctattcactttggtaaaacggatgaaagaatgtattctgaactcgcaacttcacatcctatcgacctttgccgttaccaggttgctaatggctatatggggcgtgtcggtttgattaattccggtggtgaatctcatggagaatcggatttgcgtgatgctgttgttacggcggttattaataaacgtgccggtggaatgggattgatcagcggacggaaagcattccaaaaaccaatggaagagggcgttcaattattgaatatcattcaggatgtttatttggattcttcaataacgattgcataaagtatttaatcagtatagaagataaaactcttctatactgattatttaaatgtaaaagtgaacttttgaaatgtcatcagaaccggagtttatctccagttaaccttgagtatattttccatccatggtaaccgtacaagtttgtatgaccagggaatgctatccaataatatatcgtatgcacgttcctctacagttagagtacattcccattcagttttttctataaaacccgctctattcaaaaatgattcttggagggctctgattgaagtgttcctcatttttgaccagtttgtctttgctgtttccaatagagaatctattgtgttaagttcatcttgatttagttccactcttttggggagtggctcgttggagggataatttattaacaaacggttgaggaacagatctttttcatcatactccctgtcttcatttgctataaggcgttgtaaaatgaatatagctcgtacttttgattcgttactattgaaactcctgcgatcttggcttaacatattaagcctcataaaaagcattggtagaaaaggggagagaatggccaatcctgcattgggtataggtatatgtttcaaatctccatattgttctgtaccaaaatgaggagtaggctcagggttaggagtaggaattggagtatgagttggttctgaagtagcgaagccatacacacacatatcgggagctattgcattcttatttacttttacattgccacaagttccttcatcccccgggccaatatcccagtttcctttgtcgcgtttggctatgatttttcctcctaaaataattatgtttccacatttactttttcgacctgcgtattgaccggcacctcctattccagcagatcccgcacgccaggaagtctcgtgctgataacccgcataggcttctatagttccactttcgataataatgtcgccacattcggtagcatatccgcatcctataccggctgcaccttctccaccgtatgcaattaattttccattgcctttaatgtttaaaacagattgctttctcaactgaattgcagccatttcacgaccactgtgcagtatgttttttccttcaagaattaccgtgatatggcagttttccgcaatatgaaatgcaacacccatgtctcccagatcacataagttgacatcttgcagaaatattgttgcacgtactccggcagatactgttattccatgtcttgaattggtacctgtgatagtgtacactccatcttgggagacgtggaaagtatccgattccctacccatgtctattttttcatttttcataagaataaaaattaatattaatattgtatttattgattatcatatattgattttcagcctgcttttaattgtttctgccttgagtgaccgttagtgcttcataacgattattcggcagtttatattatttgtaatttgaagagaaactgcaaatgaacacaggcaaaaatagttggaagcggggaaatctaaatactaaaatcagtaaactaaaataataattataagtgcttgaaatacagtgaagcagcttgggattaatcttcctgtttttacgatttcagcctttttttgatgatatgaagtgtgtgctaaacaggattcagcccatgtgttttgcggtaaaagcttcaatagtgattagaaagcaaacaggggaccatttgtttttaccctgcgtgtgttgtattttccaataagctttattgggtgttgaccttggctaacgggcctgtcaaccaaggttaatcggctcgttaaccaaggttgataggcctgttaaccttggtcaacacccgactattcctaaggataaagagatatatctctggttctcagtagaataatgcctaatatgaaatgaataaatgcctcgtccggatatgggttgactgcgaaagtgagagtaagccacttaccctcacactggattttttactaccaccacacttaatatcctagctatcaacgattcacattaaaagtgagggtagtgagagtaacttgaaccaactttttattgaacgcgctgcattcaacttttaagtgagacatcttcttctccattccgagggagagtaaccatatcggtttttaaaagctttgtgaaatgcagaagggctgttgaaacctgtattataacagatgtcttctatttctgcattcgagtttcttagaagcatttctgcttgttcgatgcgaagtgacgtaaggtattgaagaaaactacatccatattcttgattgaaatatctatttaaataggtggaattaacggctactctttgagcaaactgctccaattttattttttgatcatagatgaattccggtgtttgtaatagttggtttatttcatcgatcttttgaggagtcaagtatactttggagttcttcttgccatttatgagcacctctttttctacaacatctttttctgatttgctttctagttgttgatttaggttattcactgggaacggggacaatgtttcccgataaatatgcgacttgaacttttgttttacgaattggtgtaagagagaattataaaagatatatccacttaatacgccaatacaaaggttgtataaaagattgcagatgtatgaagaagtgaacatattcaataagaacatgaagaagaaccctgatattaggatgctttttctttgaatatcggaagctgattttaggaatatacagtctgtttcattcatatttcgcaagagtaatacgtaaatgaaagtctgtgtgattcctgttattatacacgttaaacggaaaagtgtccaccaagccgggaacgatgatagaatttcagcccaactgtaagttaagcgatctgccaccggacttaaaactgacatcagtatgtaacaacacgataagaccatcgaaggtaacatatgtttccaccattgtgactttaggggaaatattccggtaatacggaagcggataaagaaatagagtaaaggcgggaggaaagtcagtccccaacagtatagggtgggtaagagggatgttctttgaagcaggaagaaattttcgtataatgtgctatacgacgttaacccccagtatattagtaggattggcgctaataatatgaccaaatcctttttatgcttgtttctccaaatcagagagatagaagcaagacctagtacagcccaagtcagcagaaaagtacaaataagtaatgtctttaatatgaaaaatggcatgatattgttgttctgttgcttgcaaatgtacacacaaaagtccgaaaagagtgattttattctgcatttttttaaagtttggtaatgaaatgttggtagaaaattgtttcctttgcccccctaatctgagggttactatataacgctcgttaggtatgtaaattaccatcttgggttgtacaaatgaataattgttacaggggttatatattaattgctttttgggtttgttcgctggcggtatatggacagactgaaatgcaggctatagatactcttcgcaacatccggttacaggaggtgattgttactgctactcaatcagatgctccgggaacccgttctgtcattgggcaggatgctattcgtcatatacaggctactgacctttctgtcttatctcaattactacccggtgtccttgtacgcaatccggatctgaatgctccggccgcctttaccatccgcagtgcaacttatgaaaatacgactaatgctttagggacagccatagtggtggatggactccgtatgaataataatgccaatatgcagcaaatgggacttgaaggtaggggaagcctctttaatagcacggtattatccggtttcgatgtgcgttccttgtctccatcttctgtggagtcggtcgaggtgatacgtggtgttccttcggcacgttatggagatgcgaccagtggtgttgttctggttaagtcgaaagccggaatacaaccttttactatcggcattcgtctgacggctacggagaaacttgcttctgtggggaagggtattgcgatcagtaataatgggggaactctctatttaggagcagattatgcactttcaaatcaatcgcctcaagtctttgaagcatcttatcaaagatttggaatccaagcggcttatgcgaaggatttccggtcggctactttgcgtcttaatatgcgtggttattggatgaaggacaatgataaaagagggcagaatacggtggatggtgaatttcggaaataccaggatcaaaacatatccttttctgctaatggacagtggaaattgaatcattcctggatttccaatcttgaatatcagctagggtttacgtatgggagccagaagaatgaatccagtacatattattcgggaacgcagcaagtcactacctataccgcgcaggcaggtgaacatgccggagtgttcctgcctccccattatttctctcagttatccgttgaaggcaagccgttgagcggaaatgtatcgttgactgccaatcacagaaaaacgatgggtgaaaacatcagtaaccattttcaactggggcttcatgctgaggtggaagggaatcgtggaaaaggaatctgtttcgatcctcttcgtcctcccttggaaatgctcagagtgcggacaaggtcttatcgggatatacctttattatataagtattctgcttttgctgaaaatcactttattctccgttatgggaagatgcggaccgaagtgcaggcgggagtacgttttactcagttgccgactaagcgtctacaacggaactcttctgttgatccgcgtatcaatctttcccagatatttattgataggacggatgatgcttttctaagtcgtttcagtgtacgtctggggtggggattgatgcataagatgcctgtacttgcttatttgtatcccgataaatcgtatacggatatgaattgctttacgtacaatgatgctgagaataatcagcgtctgaccgtcatgcatacatttataactgaccgtaattttaactccgacttgcgtttgcctgttaatcagaagtttgaaataggggtgaatttccggataggaggtgttactgcggatgtggtatggtttaaggaacatctcaaaaatggctattgtacctcccaacttgccgaacctttttcctatcgccgctattcccctttgatcagtaaaggagaacaaccggaattgacggatgagggtgtcatgaatgatggtgaacttcttccatatactttgaatactacgtttgctacctatttatcaccccagaatggtatagaacaggagaaacaaggtgttgagtataccattggtccgattcactcaaaggcattgcgttcttcattttacataagtggcggatatctggatgtatgcgaaaagaatacggcactttctgccttgcatcctcagatagaagtgaatggaaaagcttacccttatgtaggtatttatgaaacagggccttctgttgcgaatactcaaatctggcaacaattgaatagccggtttcagtgtattactcaaattcccagaatcggtttgatcacaagcctaacgcttcaggttgtgtggatggataaacaacagcggggaatggagagccggtttaataaccctgtgtacacggacagtaataatcagaagtgcctgaatccggtttattatatagacggagagggaaatcaacatcctttcacgccggatatggcgacggatgaacgttttgctgatttagtgatcagggcgaatacaactaccgcttttctgaaggactcgtataaaccttatttcttattgaatcttcgggttactaaagagataggacgtcatgtttcggttgctttttgtgccaataacctgctgcaatccaatccgaaacgatatcggcagagcatacagaaatatacagttgtgaatccggatttatattatggtgcggaaattagtatccgcttttaaaattagtatttgtattaaattttagatattgaatgagaatgaaatattatgtattgtttttctttgtgttattcctatgtgcttgtaccggggatgagaatagttcctcatgctctgtgagtgtccaactgctttctcctacggatgaagtgatcttgccttttgaagagatggaggtggtattgacaaataaggatcaaggcacggtttatacctcttcatgttcttctgatggagtagctctgtttaatgtggaatatggatattatacagttgccgtacattatcaatctgcttccggaattattttcagtggaagattggaatctttatcgttattgcccgaacagggtgaagaagtgatgaaagttcagttgcaactggctcgttctaaaataaatgcattggtcattaaagagatttattatgtgggctgtaaaggagagttgggagcagattaccaggctgaccaatatgttacactctataataactctgatgagactgtatatctggatggattgtgtctggctttggtggatccgatgccgggtattgtatctccctgggtgaaatatacggatatgaaacggattcccgttgctgatatgacctggcaatttccgggtagcggtaaggagtatcctttattgcccggagcagaaactaccattgcaacgaatgctgtagatcataccggaggcgaatatcagcatgctaattcagttgatttatccaaagttgactgggggttctggcatgtaagtttgagcaaacagaatatagtacccggtgtgaaaccattgaatctgcttttaaatcttaactcgactgcatggatgtattcatttccggtagttggccccacattcatgatatttggatttgaaggtattagtgcggaggaatatgtaaataatccattgaacagggaaaacaggccccaagcttctaataagactaaattctatttgatgattccgaaagagtgggtgattgattgtgtggagtgcgtggaaaatgaagccaagcttgccaataagcgtgtgcctgatgaactgaaccatgaacctgtttatattccggaaggagattattccgggaaatcgttgatacgtaaaagtgcagcatcaaccaacgggcattttatttatcaggatacgaacaatgcggcagaggactttatcgtatccgaaccgtctttgaaaaaataaacaagcaactatgcggagtacattatttattttatggcttctgtcagcgattcccgtatatgcgcagtctgattcattgcatatctattctatgcaagaggtttatcagcagaataattggctgacaggagctaatccggtaggaatgtcattcaaccgtttccgctcgttctctgtggcggaagtggggtataggtttgaagatggaaactttggtaatgtcagtttgcccgcttcatccaataagtatgcggtgtttggtgaatcttaccagactataggtaatgtctctttatatggaaaaataggatatgtgaataatcggaagcaagaggtgaactggaatgggatgaccagtgactgctggcgtggaataaatctttgtgactcagtgagtggcaatcaacgttcggaacaatatcaactgtccggtgcattttcattacccgtttcttcgcattggctgatgggttcgaggttcgattatttagttgacctgaatgccaaggatgcagatccccggaatgaaaaccagtggatggagtggaaaataactcctggagttggttatgagtgtggaagtcaccgtttgggtgcttccatattttatggcaatcgtaaagaaacggtggactatcagaatgtaggtactcatacgacatatcctttctttgtttcttatccgttagggtactttaaaactttgcctaaaggagaaaatataaaatggtattattctgcacaggagttcggaggattcttacaagaagagggagtttatggacgcttccggctatttcaacagataggagggaaccttgtcagacaaaatatagtaagtgaccgtatacaaaacaagaaagaaggtgagacagatggctggaagctggattataaaggtataggttcattagtttctccattgaatcgccatgaatggagttggaaagttttgtttgacaagtcggatagttatgatcttttgcagcagcaggaagagaacatgggtacatggcattcttcggggaaggttctccgttctacttcccgtattaatgaatatgggttgacttatggttactatcgactttataatgagtggaatagtcgttattctatcgtttcgggaattgactttaagcagacaaaaagtcaattgtttttttatccggctgaatatacgcaaactgtgcaccgttttactgcatattctacatttactcggaatttcttattatctaatgcccgaattgatttagctattggggcagagtacggtaaaggaggtggaactatgatagctgaaaaacagttgcaatcaggacagaatacgcccgcaatcaaattatggcagaatatggatcggttggggcaggagtacaattacttaacagagcccagatgggcattacatttatctctaacttatactcataccgtttcttttacttggtttgcccaattggcggcgaggtatgaaaatgcttctaaaaatctttttaattcaaataaggaaaatatttctgtacaaataggattgtttttctaaatagattccgtagttttggagcgactaactaaaaaacaatagagttatggaaaaaaaagaaattttggataatcagacatcagacccgaggcctgttggtagatggattatttacattgacaaatgtacgggatgtggcgaatgtgtggatgcatgtagtttaggacttctttacatcgaaaatgagaaagtcaaaatgaaagaagaaagatactgtagtgaatgtgaagattgtgccagcgcttgtgcattcagggcaataacctttaaataactatatcaagtgaagaatctctatctatttctttttctgttcttatgcagtgcttgttcgaattctggcaaaaaaagagttttggataaagaattgtcaaaaatgccgatattatcagctgcttttgattccttattattcgaagtgagaaatctgccacttcaagataggatagcatctatgattaaaatatcatataggaacgaagaagaaataggtgggatacaaaaacaagaaaaacttttaatggaggttttacctttaagttctggtaaagagaggaagataattctacttcaattagtgacactttataataatttggatagatttggcatttctggagcagatataaaaggacttaaatggatagaaatgttggaaaacaatcattcgctttcacaaaaggaagaatggcaagtgaatgaaatgaaagcattattgcttaatgaacggggaaatcaagatgaatttcttcctatttggtataagttgttgaaacagtatcgtgaggctgatagaccagaagatgtgggcaagtgtcttctaactatagcaagtcattttataatgttggaagattatgaaaatgcattaccattatatgaagaggcataccagttggcattagaacataaatctatagaattacaacaagcctctggcattatgttgataaaatatttatgtggagcaggatattattcggaatcattggaatattataataaaattaatccggaaatagcgtttaatccttcaatacagaatgaagttgtaaaaagctatatggagcttaataagcctgatagtgcacgtatttacttaactgcaaggctattatctgaaagaggtgataagattgttttaaactgtatgatggctgaaacctatattactgaagagctggaagattctgcttttgtgtttttggatagggccatgaaatcttataaagagaaagcgaagaattatcaaaaaaaaggtaaagaagccatcttgcctaattgttttttatctccttgttactcgtttgccgatttattgtggaaaaaaggtaagattcaacaagcaagtcaatattatatgattgttgaacctttaatgaaagagatggttaaaacgcccgttcggatggagctacaaataaaagcccttaccaattttagttctttctgccgtgaaactaagcaatatgaaaaggctctggatttattagctcgacgagattctgttctgcaaacgtatttggaatttaaagcgaagaacgataaaaaaaattatgcagaacgtttaaagattcaggaattgaagcatgagcttaatgagagtgaagatgtaaatagaataaatacacatgtggctgcaatctgtatttttctattagtgatttctgtagtagctacattcaagtccatatctatgtaccgtaagttgaagaaacaaggtgccgtaaattatagacttcaaggaatgattaagaaatgcgatgaaggagatatgcctgaatcacattctgtatctatggatcaatatgaacttttattttggcaagctttacataaagttcgtgatgaacaatacttcctcaaaagtgaccttacgatagagacgttggctgatgtactgaatacgaatcgttcttatttatcggttagcatcaatagattctgtgataaaggcttcagcgtttggctgaataatttccgtattcagcatgccgaacaactgatgagagaaaatccttcaattgcccttaaagatttgccggaacagtgtggctatgcaaccactggtacttttgttcggaactttaagcggtgtcataacatgagtccaagtgaatttatgaataaacttctcattgaacaaacacttcctaaagtagagaagacttttcagtaaattgattatctttgagcacactaaatgattcataacttaattatcctatatcaatgaaaacaacgattttattaccggtaatcagtcttttcttattccttacatcttgcacgaatcccaatgataagaaagtaaatgatcaaacttccgaatcctccgaaagtggtgtaacctctactgattggcgatctcgttacgataaacttgaagcctccgatttgcccgacaatgtgattcaactgatcggtaaagaatggatgcttgtaacggcaggtgatgaaagttcctataatacaatgactgctagttggggtggtatgggatacatttgggaacgtccttctacctttatttttatacgtgatacccgctatacttatcaattcctccaacagcatgagagtttcaccctcagcttctttaatgaaaaatatcgcaatgccttgcgtatatgcggtacaatgtcaggaaggaatacggataaggtgaaagaggccggacttactcctctagaaactccttcaggatcaatgagctttgaagaagcacgaatgattattgagtgcaaaaagatgtttgttcaggagttggactatgccagcctgaccgaaccttataaatcaaaaatcatggaagaagcttataaaaacgaaccttccaaacatcaaatgtttatctcagaaatcgtcaatatttggattaagaaataatattcaacgaaattttggtcaattattccttttcattggtaaaagaccaaagtgtttttggccaattcttggaattcatagtcttttctgtatatttgcgcccgcattttcttaagtatcacttatatataattgtccctataatcagaatttactaaactaggtagagtttatggagaaaataaacgcagtaattacaggagtcggaggatatgtacccgattatatcctaaccaatgatgagatttctaaaatggtcgataccaccgatgaatggattatggggcgtataggcataaaggaaagacgtattttgcatgaagagggactgggtacttcgtatatggcccgcaaagctgccaaacagttaatgcaacgtacgaattctcaaccggatgaaattgatctggtgattgtcgctactaccactcctgactatcgtttaccttctacagcctccatcttgtgtgagcgactgggattaatgcgtgcttttgcttttgatgtacaggcggtttgcagcggtttcctgtatgcactggagacgggagcaaactttattcgctcgggaaactacaagaagattatcgtggtaggggctgagaaaatgtcttcaatcatagattataccgatcgtgccacttgtcccatttttggtgatggtgcggcagccttcatgctggaacctactacagaagatttaggtgtaatggactcagtgctgagaacggatggtaagggactgcctttcctacatattaaagcaggtggctctgtatgtactccttcgtattatacgctggataatcacatgcattacatttatcaggaagggcgtacggttttcaaatatgccgtagccaatatggctaatgcttgtgaagctgtcattgaaagaaaccatttaagtaaagacgaaattgactgggtaattccacaccaggccaaccagcgcattatcactgctgtaacgcaacgcttggagattccaaccgagaaagtgatggttaatatagagcgttatggtaatacgagtgccgccacacttccgctttgtatctgggattttgaagataagctaaagaaaggcgataacctcatctttacagcatttggggcagggtttgcctggggtgctatttatgtaaagtggggatatgacggaaaaaaggaatagtagcccgggttactattccctataacttttcttattataacaacccggatatacaaatagtttatcccatcaccttttgccaaaccttcattttatttttttttgagtatcatattatattgaagttattataaaatattatctttgtggggaatcattgcatgacaacacattgttaaccatacaataacttaaaaaacaaccaacgtatgaatcatgagctatcgatgagcgccaaccaactggtggctgctcttcaaaaaccggcttccgaatttacgaaagcagacattatttcttatatcaaggagaacgatattcgcatggtgaacttcatgtatcccgcagcagacgggcgactgaaaacattgaattttgtcattaacgacgctgcttaccttgatgccatactgacttgtggtgagcgtgtagacggatcaagccttttcccatttatcgaagcgggcagtagcgacttgtatgtagtgccgcgtttttgtacagcctttatcgatccttttgctgaaactacaacactttccatgctttgctcttatttcaataaagatggcgaacttctggaaagttcaccggaatatacgttgcgtaaagcttgcaaagcctttactgacgtaaccggaatggaattccaggctatgggtgaattggaatattatgtgatatcagaagatagtggactgttccctgccacggatcaacgtggctatcatgaatctgctccttatgccaagttcaatgatttccgtaccgactgtatgctgcatattgcaaaggcgggcggacagatcaaatacgggcattccgaggtaggtaacttcacgcttgacggtaaaatctatgagcagaatgaaattgaattcctgccggtacgtgccgacctggctgccgatcagttgatgattgcgaaatgggttatccgtaatctggcttatcaatatggatatgacattacgtttgctccgaaaattacagccggaaaggccggttcaggattgcatatccatatgcgtattatgaaagacggtcaaaaccagatgttgaaagatggtgtactttctgaaactgcccgtaaggctattgcgggaatgatggagcttgcaccttccattacagctttcggtaatacgaatcctacttcttatttccgtttggtgccacatcaggaagctccgacaaatatttgttggggtgaccgtaaccgttccgtattggtacgtgttccgctgggatggtcggcaaagacagatatgtgtatgctggctaatccgttggaagctcccagccactatgatactacacagaaacaaactgtggaaatgcgctctccggacggttctgccgatttgtaccaactgatagccggattggccgtagcatgtcgtcatggttttgaaattgaaaatgctttggagattgcagaaaagacctatgtgaatgtgaatattcataagaaggaaaatgaggataagctgaaacaattggctcaactccctgatagctgtgccgcttctgccgattgcctggaaaaacagcgtgctattttcgaacagtatcatgtatttagtcctgcaatggtcgatggaattatcagtaaattgcgttcctatgaagatcgtaccttacgtagtgaagtacgtgacaatcaggaggaaatgctaaaactggttaataagtatttccattgcggataaagcaaaacttgtatttgtagataggagtatagaatagggaggttcggatgtagaagtccggatctcccgttgtttactcaataaattgattataaaacagggctttatgacatcaaatgtgaaatctttggtctataaaatgaatatagtgattgactgtaaagatgcaggagttttagcagagttttacagtaaattgctggggtgggagctgacacatcaacgtgcaaatggttgggcggctattacttctccatccggtatggtgatggcgtttcaggagattgaagagtaccagccacctgtatggccttggaaagaagataagcaaggacaaatgcttcatcttgatttctatgtggaaaatctggaggaggctgtggcttatgccattcagttgggagcccggcaggcagatgagcagtacttcaggacttcacgaacgatgtttgatccggcaggacatcctttctgccttgatacggaagaggctgaataaatacaccaaacagttactgaacaataaagaatataccatgtccgaaattgcgaactatttcctttatagaaatgccgaaggcgaaaccggtttatccgctaacagcattgacgacctgaatctggatgacctgtttgccgaaatagattattgtcattccagtataggcaggcagtatttgtattatcttctgctatcggataaaacctccggcatggaaaagcaggaagcacttctgtcttcattggcaactcatacggagttgcgtactcttttaagcaatgcactgaaagaactggataaaccggatgcttattccatcgtatccattctggaaaatgataatacagggattggtgccaaggagatggttcttattaatatctgtcggtttctgcctttgctgtttctggctctgatgctgctcactcattcgggagtgtttcttactttatttgtcttttcattcgtggcaaatgcagtgttgcactatcgtaataaggcgaaaatccagagatactttttctctatacctcagcttctgaagatgataaggcaggcgggaaagctggcgcagaataaggagtttatctctgtagatccttctatcacgactgacttgaaagctgtggaaggtctgaagaagtatatctcttatttccgtttcaacctcagtctggataatgacatggctattctattttatatggcagcggaattaatccgggtattctttctccacgaagcgtatgcggtaggcagaacttttcatctgttgaaggagaaggcgacggctattcacaatgtttaccgcttcatcggttttctggattctattttgtctgttgctatcttgagggaggagctaccttattactgtctgccgggagataacagggcaggggagcggttgcgtacacaggctgtgtatcatcctctgatagaaaactgtattccgaacgatatggtgcttcatgagaaatctgcattgataaccggttcgaatatggcaggtaagacctgtttcatgcgtacgataggagtgaatctgttggcagcgaaaacacttcatacttgtttcgcagaagtctttgagataaataccggaatttctcttctgtcctccattcaccagggagataacctaatggaaaataagagttactttatgcaggaagtgacgactatcaaagatttcgtagatgaaagcggtcatgggaaccatctcttcctgctcgatgaattgttcagaggaaccaataccaaggagcggatagcgatttcgaaagctgtgctttcctggctggtgaaaagtgataatctggtatttgtgtctacgcacgatctggaattggccgatatgctggaagatgaatacgaattatactatttcagcgagtcggtgaaagatggtatcctgtctttcgattacaagttgaaacgcggagttgcgaccgaacataatgcaattaagatattggagatttgcgattatccggcttcgttggtgagtgaggcccattcaatcacaagtatataatgaaaaacagagagagtgtaggtatgataccccgcctccctctgtttttacggtaatgaacagattgattacttcttagcttcatcagccatagagtgcactttgcctttgatatcattggctttttcagcaatgacagacgtttcattggctactctgtcagcaactttttctccggcatacaatgccttttctttagcagattcgatcaggcattcggtatgtccttcaattctgtgcagggcatcgaatacttctgctttcattttttttgctcttgcactgcgggcaaagccataagccagtgctccaaagattgaacctattccaaggccaatcaaaaagtgagaatctttacatgtcataattaaacaggtttaatggttaaaaactaaattaatgttctattttggtcagagaacagagtgcacaaggcattagttcaacggggagggaaagaattactactatttcacaatttatgagaatcaggagttgaattaactctttcttgtagggttatgaatataattttaggcgcggattacgcggattacacggattcttttcctgtaatatagtgcgatagcgcagccattaatccgtgtaatccgcgtaatccgcgcctaaatcattatcagcatttagttcattactttcccgttataggtaaaacgatgatccagtatgataaatattctgtaaatcggtggtaaatgtttacaaagtaagatctccttgagatcaatcgtatacatagggtatctcagtatgatacttagggtacctcaatatggtacttagggtgtctcagtcatatactatgataccattattataatatgtctgataatcaactgtttatgaagtatttctttagcgttgataaattgtgacaaatgccctgtttaaaatgatgaattatttccttttatatcgttataaatcaaatttaataccagattcgtataatttataaatattctcttgtcggattcctttagctttatctttggcgctcataaacattactactgcacgtacgttctgtggtacaagcagttttttgaatcatgtaattaaaatcaatgctttatgaatgtagaaagaaaaaatgcgaaagatgacttacggctctacataccggaagtcatcgggatgctgaagcgggaaggaaagttcccggcaatgcatgtttatgcttgcacgctgcgttcctatgagaagttttgtgcagaggaaaggcatccgaaaaacatcactgcttccctgtccatgcaggagattttcacccctgagaggctgaaagagtatgaggactggctggctggacaacagtccagtccgaacacgatctccacttacatgcgtacgttgcaggcggtatacaaccgctggatgtcaccgggcatagaggggtacaatccggtgctgttcaaggatgtttatacgaaagtggagtcgcgtactaagcgggcgctgacggcagagcagatggagcaactcaggaatacggactttagtgtgctgacactgcgtcaacagcaagtgcttacctacttcttgctgatgttcatgttgcgcggtatgccgttcattgacctggcacacttgcggaagtcggatttgagaaataggcgcatcacttaccgtcggcacaagacggggaaactgatggtggtggatgtgccgcccgatgcgatgaggctgttgcagaagtacagggacaagacggattcggaatatttgttcccgttgctgcatggtggcttgttcatggaggaacatcaccaccgttatcaagaaacattacggcatttcaaccgggagttggcgcggttgatgaaacagttattgcccggtgtttccgtaagttcgtacaccgcacgccatacatgggctacacttgcttatcatagtggtgtacctgtgggactgataagccagtcgttggggcactcgtctattcgggtgacgatgacttatctgaaaccgtttgatgcggaggtgatagacagaataaacaggcaagtgatttccttggtgaagaaaagtaaaaagaagaaagatggcagatttaatatgctgtatggcacttcgttgaggtgaaattacttgcatagtaacggcaaatagcagctacaaagttgcgtcttttttgacagaaaagcaaacaaaccctaacaaaatatgaataaatcttatatcggacagcaaaaacaatattaaaattagtccctaatacatacagctttcgattttttatcccagcaggcaaaaggaatcgtgtttccgctttatcctttgaaagtggaatgcttctttacgtaccttattatcaggaaaacttctttttaccataaaatgataccgtctgaaaacgcctttccggtctgcatcaaatggtagtttgccgttactatgcaagtaattccaacaaacgcattaattatactgtttatgaagaatatagaacttcccatcaaaagaggagaccgtgtgtgggtgaaggtttataatgaacgaaatggctcattcacttcgcgtatggcggaggttatatctatattgcaaatgtatgtttccggggcagacgtaccgtatgtagcattgcgttatctggacgactgcagctatggatgtattccttatgaacaagtcaccgaagtctgcgacgagtctttttctgaataatgacactgtagttttgttgatactaatagccctgctttcttcatccgccagtatcgtctgacaaagaagaaaagcagggctttcttttataaccaacccgaaaactttctgatataccagttctttaccaattgagtcagcacgcaataggagagcagaatacccaccagccacgggaagtaactcaatggaagcgcctgcaaaccaatggatgctccgaaagatgtgaacggtatcacaattcctataaccatcaccaaagtagtcataccgattacgggccaagtggcacggctctgtatgaacggaattttccgtgtacgtatcatgtgtacaatcagagtttgcgaaagcagcccctcaataaaccatcctgattgaaacaacgactggtgttccggactgttacagccaaacacatgccacatcaccagatacgtgacaatatcaaatatggaactgatgggcccgatataaatcataaaacgtttcaggtctgatgcatcccatctgcgtggctttctcagaaattccgggtccatgcggtcgaacggaatggtagtctgcgagatatcatacagtagattctggatgagcagatgaatcggcatcatcggcaagaacggcagaaacgcactggcaaacatgacactgaacatgttaccgaagtttgaacttgccgtcatcttgatgtacttattgatattcccgaaagtcttccggccttccagtactccgtcttccagtaccatcaggtctttttccagcaggataatatcggcactttccttggcgatgtccacggcagaatctaccgaaatgccaatatccgattgccgtaaggcggcagcgtcattgataccgtctcccagaaatcctacggtattctcctgttcctgtaagatggaaataatctgtgttttttgcagaggcgtcaatttggaaaagcaggtagtggtctttacacgctctttcaaagtagcctcatccatattctcaatatccggtccgatcaatgaataacttgtgtcgataccgacttgccgacctatggctttcactacaatatcattatcccccgataagattttaacttccacaccatactcatgtagttgcttaatagcttctgccgcagatggtttcgggggatcaagaaaagccaggaagccaatcagaaccatttccttttcatcacttacggagaaattacccaccttttctatatagcttttctgagcaacggccagtactctcattcctttccggttcatttcttcgctgatcttttgggctttgaccttcagttcatccgtcagagattgcacttctccattgaattcagtgtgcgaacagatactgagcatctcttccacggcgcctttggtgatgatctggcgtttcccttgtttgtcttctatcactacggacattctccggcggatgaaatcgaacggtatctcgtccactttggtgtaggcatccttcagatgttccagcttcagttcctttacatgcgagaggatggctttgtccatcagattctttaacccggtctggaaatagctgttgaagtaggcgtgacgcaatattcgtttgctttcgtcattgctgccatcggcattgatgtacttttccagaacaatcttgtcgcacgtcaacgtacccgttttatcggtgcaaagaatattcatcgcaccgaagttctggatggcattcagattcttgacaatcgtttttttcttcgacatggacagagcacctttagagaggttggcggttacaatcatcggaagcatctcgggcgtaagtcccacggctaccgaaatggcgaagatgaaagcttcgaaccaatcccccttcgtaaacccgttgatgaagaagacgaacggaaccatgaccagcataaaacggatgagcagcaggcttactttactgattcccctgtcgaaagcagtagtggcgcggtgtcccgtgaggttgcgggcgatagtaccgaggaaagtcctgttgccggtttcaaacacgacacctttggcagcaccactgataacggtggaacccatgtagcagatattatccagttccacgatgctacctttccggtattgcttttcctttacttccggaaacttctctatcggttccgactccccggtcagggaagcctggctgatgaacaagtccttggattcgatgatgcgcaggtctgccggaatcatgtctccggctgccaggaagacgatgtctcccggaaccagttccgtgatatccagttcttcctcaccacttccggcacgcttcacgagacaggtattctttaccattttcattagcgagtctgtggcttcgttggctttccattcctgccagaagcgcaggatggcactacacaccaccatgacggcgatgatgacgactcccgtccattcctgttctcccggctctgccatgagtacatcgatgacgagtgatatgactgccaatccggtcagcactcctataaacggattgatgaaagttttaatgaatacgatgaacggattcttcttttgttcgtgaaccacttcgttctttccatacgtaagttggcggtcttcaacttctgcttttgtcaacccgagccttgtcgtttgcaggtatgagtaaacggattttgccggttgtgtggcagtcaggaatactttctcggagttgagtgcatactgaggctgttgtaactttttcttccacttcataatctctttcctttttttgaagttactaattgcgtttctatttcacggtgcaaaagtaagaacggcttcgtggagaagccgttagagatttattagagtggtattagaaaaccattagagaaatcagatatgcgggagtttaacgacgtaagtggtcccttcacccggatgtgagaagacggatatttcccctttgtgcaggctcagtatcttttgtgccaaagtcatgccgatgccgtagccggatgccacatctttgttttcgccacggtagaagagttggaacaagttctctttgtccttgtccgacatgcccacaccgtcgtccgaaaggcggatgatggaccattcttcccagaaagaaatctggataaaagaagtttggttccgggagtatttgcaattgttttcgatgaggtttacgaacgctgttgtaagcaggtaactattaccgatcactgtgagcaccttgtcgtcttcggcttcctgctcgaatacgagttccacatggaaatcggggtgcgccctcaagacaagttcccttgcatcgagcaatagctcgtccaagcggatttcttctcttttgatctgctccggttcataatccgctttggcaaggttcagtaatccatcgatgagtttaatcactctttgcgaatcttgcaacgcgttgtggatggcgttttggtattgttccggacttcgttctttctgtacggcaagatcaagttcggcagaaagcgcagccatgggggtacgcagttcgtgcgacacgttgctgacaaacatcttctgcgagttgaatgacttttccagtctgtcgagcaaggcattgaaggtaaggctcagttcgcctaattcgtctttctcattcttgacgggcaggcgtttgttgattcgtgaggcggttatgttctccgcttctttcacgatgcttctgatgggtgccaatgcgctccgggcaaggaggtagcctacaataatcagcacggtcagtccgctgaatagtaatagggcgagtgtttctttcaggatttcccgtttggcatatccgtagccgtcataagcggcggcggtaacgatgtaatccttaccttcgaaagtatagatgatgcctactccctggtaatctccgatgtagaagtctatttctttcttctggaggatgcgctctatcatttccggagtttcctttatgatgtcgttttgcaaggcatcgtggtataacatccggaaatcggtgtcgtagacggctacttctacttcgtcgataaactttttattgttcaggtaaatggattgcatggtttcggcatccacctggttgttcagaaacagatgtgccttggtgatggcttcgcttttcagattccggaaaaaggcattgctgcgcgagtgctcactgacgtagtagatggcagtgataaataccaggaacacggcggctgtgatacaggtgtaccgcagggttaaggctgttctgatcttcatagtttatccgtcagtataaagcccataccggctttggtatggatcagtttggtgtcgaaatccttgtctatctttttgcggagatagttgatgtatacgtcgataaagttggtcccggtatcgaaatgggtattccaaaccttttcggctatctctatacggctgagaacccgctctgcattctcggccatgtagagtaacagattatattctttgggtgaaagtttgatggaagtgccgtttcgggtaacattctttccttgtaggtcgatgtacaggtcggaatatctgatctcccggggctgcggtgcggctgcttcagtattacgtttcagcagtaccctgattcttgcatagagttcgcgaaaatcgaaaggtttcaccatgtagtcatcggctcctgcatcgaatccatccagtttatcatctgtagagcctaaggctgtcagcatcaggatagggatgcctggattcgttttgcggatttctttacatagctcaaaaccatccatcttgggcaggataatatcagaaatcaccaggtcgaaagtatgggcacggaagagacgtagtcccatgacaccatcgtaagctaccatggtttgataaccattctcttccaatccattcttgagcaggctggctactcttggttcgtcttcaataatcaatatcgtatgcatggtccgtattttttatagattccagttgtttttgtttgagaccatacaaatatagagattatttgtgagtttctcttttcttactcttttaataaaggcaactggttcagcatattcctgattttaatagcgatacgtggcattggttcggctatggtcaatcctaccaggtcatattcggaagcaatgtcgttgatcacacggactacttcctcagtcttcatcccatccggttcaacgccgacgcctgctatcatatcggcaggatctatcacgtccaggtcaaagtggatgacaaccttggaagctccggtacttttcagccatttcataatggaggaactgttgtccgctgtttctttcggtgccagaccttttatgcccagttccttttgccgttcctgcatgcctttgtcccatgaacgcagtcctacgattaatgctttggaagtgtcaaacttaccgggcagtaagttcataatctcttcgtcacccattcccaagcaagcggtgagggccatggcatgataccctttgtaatcatcataaggcaggttgatgtccggatgcgcatctatccagactatggctacatcgttcgggtatcgggcagccagataagtgaacggaacaacgctgaccgaacattctccgcccaggatgataatccggtccggtttgttttcgttaagtatatcgagcgcagccttgctttgtttgacaatcacgttacgggagttgatacctttttccgttgctctgtcgtttatatcaagagataccggaacttccacgtttttctgattgctgtccggagccagcaggttcagtaactgggcacctaaataataacctctggaagagtcttctgccggaatatccggcatccagtgatctacaattccgccttgccattgcggataaatcaggcggagaggggtggtttctttcttcatatctttactttttacgggtggtttttttagtcgaatggtaccttccagttttcatcctgataggcggcgaaacacatggctatctgttctttattgttcttttcttcggccaatgcaggtatctcgtccagagagaaatagttgctttcggtagtctctatattgctctgaaaacttccgcctgttacttcgcaaagaacaaaggctttgcagacattgtatgcataaggaggcacgttgtgcaggtttctatcctgcaaagcaatcaggcgtacggcctttacatctagtccggcttcttctttgacttctttctccgtattggttttgatgctttggttgacgtctacccagccaccgggcatagaccatacaccagctttttcctttaccaggagtattttcccgtctttaaagatggcggcacgagtatccagtttaggtgtttggaaaccggtttcattgcagaataattcttttactttctctatcggcagatcgctttgatggctcataatctctgccgatatttcccggatacgttcaaaacgctcgatgtcgaatggatcgcgggagtaggtcagtcctgcctgagctatgaattgtaattccttggcccattcgagccagcggggatcagtgttcttattcattggatatctgagtttaaagtatcatatacaattttagatatactggcgatgatagctgcattatctgcatcggtttcctgcgactccatgacgaagacagctatataatatttctgtccgttgggcaggataacaaaacctgcatcattatcagcaatctttatcccttccggagtccggtcggaagagcctgttttatggcctacgattacgtcggcaggcagctggcctttcagcttatctttgccggtagaagtttcctgcatggttgcttgcaggaagtctttgtattgagttccaaataggatttgcttgtcggttatattcaatagtctgactacttcttccggagtactccagttcagataggcatctccggaggtatgcatgagagtttctgttgccgcaagattacaatcctttattcctaacgatttcacatactcatttacttggtctatgccgccgacatattctataaggatatcacatgtattgttatcgcttttcgaaatggtgtattttagcaactctccgagagaaattgtaatatcctgatcaggaaactcatctcttaacggactgtatgtatcaggcttcagttgagaagacttcacttcgataaggctgtctaagccgatgtggtctttatccatcttatccagaacagccagtcccacatgaaacttgaagacgcttaacaggggaaaatggatttgattattataaacggctacaatctcatcattggcgagtagggcaacgcctaccgtagctttcttatctttcagaagggaatctatttgttgctctatcttctgcttcggggtgcggttggtggtattgcatgcactgaataagattgccagcgccatacaacttaaaaagaattttgctttcatacgtgaattacaaaggattaataatatcagatggtgatcaatttctcattatttttcaagtattgagtaagtggttctcccatatatcttacggatactccaagtctggttaatctttctgttacttcaaaacggtcacagcaatctttgcatgcctcgatggttactccttggtgcagcatttctaagatttccgtctgtacttgggtatcgttgcctgccagttttgctgcggctccccagattatgacgttcacttgttcccaccatttacgactgagtgaattgatggcatacattgataacatattgaagactgtgtctttgttatcagttgtccaaagaatgtttaatttattgtccatagaacgtagtttttagtttttatagttgttaatttacgggtgattcaggagttagtatcaattcataatcaaacacgtccagccagcgatcgaatttcaatccgactttctcaaagtgggaaacttgcttaaaaccaagtttctgatgcagggaattactggcttcgttgccttccgtgatgcaggctatcaatgcgtgataacctctgtggcggcattcgttaatcaacgtctgcatgagttgttttcctattcctttgccttgatattcggatgccaaataaacggttgtttccagcgtatgcctgtaagccgctctttctttccaggcatgggcataacagtacccggcaattttaccttccgtttcataaacgaagtaaggaaagtgtgatactattccggttatgcgtgaacgcatttcctcttcgcgtacaggttctgtttcaaatgtaatcacactgtgtgcgacatactcgttgtaaatggctgtaatgcttccggtatcttccggccctacttctcttatcataacaagtgcaattctttagcaatccggcaagcttcaatagaattgtttacctgaagtttctccaggatattttgccggtgccggtttacggtgtttatactaatggataatgtctgggcaatgtccttactcatttttcccttatttatcaattgcaggatttctttttcccggtctgacaacaggtcgttgcaattctgcttttccagttcgagggtttgcccgtctgccgagttaagaatggtgcaacttaacgacgtatccattgaaaagttgtaaaggcataaggataaccatacacttccgtttgagtggctcgctatataaaacattctgtgcaagatgtgtacatacctgcccgaatgatcgcgcatgcgcatattgtgtataaggtagtagtccgggcgtttcttttccgggacacttttcaggaagtggaagaagcggagttcctgcaaatgcttttcctgtaagtcgtccggatgaatgcggctgaatatttcttcttcccatatcgactgaatggtcttggcggtatttcgttctgccagtcccagtttctcggctactccgccgtaataaatataactaatattggctttcatatcgctcaacactgctatggcattttcagtctgtgcatatatggaagctatatgtttgcactcattcaggcgttccgtctgtttctgttcctcggtgaacgcttgtttcagtagctctttcttcagtttatttacgatgtccatacggtatggaaatggaaaatggttattaatcagtattgccgacttatctgtaagcctttacctttgcaaaggtaatgaaaactaatggttatttattttaagtgcaataaattatggagagtgaaaaagcaaaagcgaaagctgggaaattgtatgatgccaataatgatatagagcttgtgtcggagagggaagcttgcaaagaagtatgttatgaactgaatagcttgcgcccttcacagaagaaagaacgggagagcattatccgccgactgttcggtaagaccggaaaatcgttcttgatagaacaaccattttattgtgattacggatataatatcgaaataggggagaacttctattcgaatgtgaattgcgtcattctggatggagctaaagttacatttggcgataatgtttttgtggctccgaactgtggtttctatactgccggacatgccttggatgcggaacagagaatccagggacttgaatatgcctatcctatcactatcggaaataatgtgtggattggtgcccaggtctgtgtgttgccgggagtgacgattggtgacaatacgattattggtgccggaagtgtggttacaaaaagtattcctgccaatgtgctggccgtcggtaatccttgccgggtgctacgtacgatcaccgaagcggacagggctaaatatatatcagaataataattcattaaaatgacacgagaaatgaaaaagttactttttagtctgttgatgatgattggggtacaagcctcttttgctcagacattggagaaaatgcagtggttcaacgaacctgaacagtgggaaataaaggataaaagtctttcgatgtttgtcactccgcagagtgattattggcgtatctctcattatggctttactgtggatgacgcccctttctattatgcaacgtatggcggtgaatttgaagttaaagtgaaagtgactggcgattataaggcacgctttgaccaagcgggactgatgttgcgcatcgatcatgaaaactacatcaaagcaggcattgagtttgtagacggaaaattcaatctgagtacagtggtgactcacaagaccagtgactggagcgtaatcacattggataaacctgttccttatatttggattaaagctgtccgcaggctggatgccgttgaaatcttctattcgtttgatgacaagacttatacgatgatgcggaatgcatggttgcaggataatattccggtgaaagttggattcatggctgcctgtcccgatggaggcggatttaatgttaagtttgagaacttcaaggtaaagcacttgcctgatatgcgcaggttggaatggctgaaaaagaatgcagaataaatagggttagttcaattaagtttggtaaaaagacaaatgccggcaaaaagaagagtgaatctttatttgccggcatttattctgttttgaaatttaaagaaatccttttctgaaatagccttgtttaatatcctatggtgaagcgctccttgtggtgcttcttctgttccaattcgtctaccattgccacggcatagtcttcaacggagatattgctgtctccatttacatctaccactaagtcatcttttccgatacggaactttccggtacgttcaccaggtgtcatgttggcggcaggagagaggaatatccagtcaatatcgttttctttacgaagcgtattcagatagaattctccgagggatttgattccgggtaacagtttggctggaacatcgtcagcatccatcaccatctttccgggagcatagaacagggttccggcaccgcccacgataagtagacgctcaacaccggccttcttcacactatccactatcagcggatagttcttcagtgtttcttcgtatatattgggattcttccagccggggttataagcactgatgacggcgtctttacctttactggcctcaatcagaacatcggtatcggttacatctgcctgaatgactttcaggttcggattgctggcggtcaccttggccgggtcgcgtacaatggcagttactttatggcctctgttcagcaattcattcaggatggcggttcctacaaaaccgctggctcctatgagtactacatttttcatattggttcgttgtttatatttatatattaaactgtttatgttcgataaaggttttatggttgtggacattttgggaatgtttaatactaacacgggctgtaattctgaatcctattatattatcattttcccctccctttgcgaacaatcatactttttttatattgtagttgaatactaaatataatagaagtatgaaacagaaaagtttaaccggcttcatgaatgaagtcattgaagagttgtgtcaacaggaacgctttgccacggcccacatttacacgtatgctcttcgggcctttaccgagtttgtaggtggtggcgaaatcttcttcggtggtctcaacaaatcctccctccggcatttccagcgccatctggaagacttgcaacggagctacaacaccatctccacgtacatacgtgcgttgcgggcagtgtataaccgtgcggtagaccgcgaactgatctctggagagttccgcctcttttccggactgaaaaccggagtaacctccgaacgaaaactggcagtgacagcctcacagatgaaccgtttgcttaatcctccaaccacctgcaacgagttgcctaaggaagtctgccaggcacaagacagcctgaaactgatgcttttactacaaggtatgccctacgctgacctggcacacctgcacaagaaggatatccaaggcgatctccttacctgccgacgccgcaagacaggtactgaactatgtgtgaaagtagtcccggaagccatgcgattaatcaacctctaccgtaatcaagattcatcctcaccctatctgctcaatttcctgagcggcactctgaaaggtgaagcagctttcaatgaatatggcaggaaactgcggaacctgaatttccaattgacacgattgtctgaactttgtggagtgggtgatatcaaagtaagctcctatactgcccgccatacgtgggcgacacttgccaaatactgccatgtaccggaagaaatgatttcggaaggattgggacattcctcgctggaagttacccgcacctatttgaaaagctttgacggggacgagttggcgaaagtgaatcaagtgataattaattacatttactctggaaagaaaaagctatggagtagggcgtaaaactgctcttactccgtaagtaacggaactattaatacgcgacaaagatagagtaaattttataaaaacaaatcataaaccttgaaaaacgataacattttaactttatacacgacttcagtagaaaaatataccgacaaacaaacatattacggtcctatcgactatgagaaaacacacgattctccttcccacgttatacccttcaacatggatatgtaacttcttacgcattattcctgcataaagcttggttcaaggacctgtcatgctcccataacgccttacagcattcgtatttgtgggtttccgttacttacggagtaatatcactcaagcgctgttacttacggagtaacggttaaacccttgcttatgctgacaccactgacacagacagccattgccgtattatacgacatatacaccggcgaccatccttatcgcacaacacattctccagttgcgccatcatgcttgatcgaccttctggcctggcttgaaaccggcggtctgatccgccgtaagaatctccccggaacgaatctccctgccggggatccgctctcttcgtatgagcttgcccgcccttattcgagcatctccctgctggatgtactggaaaccctcggcgaacacctgaactgtaattatcctacccgtgaggaaatgtattaccgataccgttcggccgcccatcgcctgggagttatcaaccagatgacccgtctttacctgtccgaaatcaaactccccgacctgtaatgaaacgcttcctgtacatattcgcccatagcctctgctttctactgtctgcgggaggttcctttatggtaaatgcggcagccgtacgaggcgtgcagccggaaattaccatgaccgtctccacccgtgacagcctctaccggactcctctactgcttcatttccgtcagaaccgttcgctggtggagtatgactatatggacaatccacgcacgcttgcctgtttctgcgccttgttcaccgacagtctttccacaccgggcattgataccgtcactatcttttcgtatgcttctcccgaaggtgatgcccgccacaactttgcccttgcacggcagcgcgccatcgccgtgaagggttatctgctctggaaatatccccatttgaatcgtgaacgcctgttgattgaaccggtaggtgaggactggcttaaactgcgtgaactggttgttgccgacaactcggttcccgaccgcggggaggtattgcatcttctggatgaaatacccgaccgggaacgttgtaaggtgttgctgaaaaagctgaactgcggatatgcttaccgctatatctgtaaaaagttgcttccgcagcttcgcaatgcggcggtctgtctggtaaaactgaaaaccgttcaaccggattttgcggccgaatacgattccgtacttaattatgttgattataaggaaagtgtggcatctcgcagcctgacctgtcaacacaacctgtctaaccaacacagttcatcagatcaacatagcttgccgtctgaccaaggccgtatatctgaccagtgcggaataccttttcaacggcctgcatcctgcagcaaccttttgtccttacggcggaataatccccctgtatcttccccgcctgaacggctccgttctttccgccccctgttcgccctgaagacgaacctgctgttcgaccttgccatggtcccgaacattgagctggaactgcctttaggaagacacaatcgttggtcattgaatgcggaatggctgtttccctggtggcttatcgaccatgacaagtactgcctgcaaatcctttcgggcggtctcgaaggacgttactggctgggcaaccgcactacccgtggcgcacttgccggacactttctgggcttgtacgccggaggcggcaaatacgaccttcaatggaaaacggacggctaccagggcgaattctatatcgcttcgggtatcagttacggctattccgccccgatagcccgccgcctgaatcttgaattcagcatcggcatcgggctgctgcgtaccaattatgagcattaccatgccatcgacgattaccagaccctgctttggcagaacgacggcaactatacgtggttcggccccacgaagataaaaatctccctggtctggttgctgggaggcaggaaaggaggggagagatgagaaggatcagtgataaacggttagtgattagtgataagcggaggaatgcggatattgcacatgtcccgtattatttctctttcctttgcgccttatgctgcctgctgttgttatggggttgcgaccgccgtgacatcacctattatacggaagctgaattcagcatccgggtggattggagcaattcgaggctggatgcggaagaatccggctacggcgctacggccgtcttctatccgcaggacggaagttttcccattactgtactcatgggcgaccgtaacagtgagcgggtacgcctacatacgggacgttatgatgtgattgtcttcaaccgctcatttaccgacttcggttcccttgccttccgtggtgagggcttccgcggccttgaagcctattcgcgtgatgtggagacgcgcaccgaccccgtcacccgcactgagacgcgtgtcatcgtcagttctccggaaaaactcgcctccggcgtgacggagggcttcgaggtgagtgaagagatgctggggaattacagtgctccgtccagctcgcacagccgttcggggatgtcatcagggacaggttcggatgactatacgctctctttcgctcccctctgcctgacgcgtgaggtgaaagtgcagatcaacgtaacgggactgaacaacatccgctcggcggtcggcatcctgacgggtgtttccgaatccgtcaatctttccacaggtaaggcttcgggtgaaaccgtctcgcagcaattcactctggacgacatcaggttcacggacggctctccgttcaacggcacactgacgggtgttttcaatgcgttcggtttcgacacggccatttcccacaagctcacggtgaaagcccttcttgtggatggcaaaacggtgtttgaggagactttcgacattaccgcccacgagctggaagatgagacgggaaccttgctcctgtatatcgaggtgaccgctccgcccattcccgacgtaaagcctgaaggtggtgcggattcgggcttcgatgcggatgtggacgactggggggatgaagaggagaatgagctacccatgtagtacggagatgaaatgtattttataccaaaaagaataaacgtctaattattaaaaattacaaaaaaatgaagacaaaacatgtatggtttgcgctttcagcccttgccatagcaggctgctcgcagaatgagattacggaaataagtccggaggcaaatccggaggtggggttcagtgtatttacgggtacacagacaaaagggacaataacggataacacggagtccggtacaggtatcaaagcaaagggtttcggagtgttggcgtattatacgggagcaactgactttgcaagctatacaagtcctactcctaatttcatgtggaaccaaaaggtagaatataagagtagtgcctggagttacacccctctgaaatactggcccaatacgactgacgaaaaaatctctttctttgcctatgcaccgtatgctgacactcagaatactgcgagctcatctaatggcatcgaattaacggcggcaaccgcttccggttatccgaagattaccttccactggaatactacgactcccagtgcgggagtagaccttgtagctacgaacgctgcccagacaggcggggataaaactgttgatctgaccaagcaaactgctgccgttccgtttaaattcaagcatgtactttcacgtgccaacttctgggcgaaactggatggaagtgtaaatgacagcgagacaaaagttttcattaaggggattaagctgttaggtacgggcgcatcaacacctgccgcagcaaatagtagttctaaattttatactaaagcgacatataagtgggaagacgggacatgggattatacagccggaactaagcaagccgctgccgtagacttggatggaggcattctcaacaagacaacccagagttttggttcaggaaatgtatataccacatcgtctgttgcagttactgccaccgcagcaagtatgttcaaagccactcagtatcttttcctgattccacctgcagcaaacggtatcgctgcttcaacggacatccgtatcttgctgacgtatgacgtggtgactctggatacaaaacttgatggcggtaaatcagtcatagaagccaagtctgttgtttcccttcctaatggaactttgaaaggcggttctgcttataagtatgtatttactatcggtctggaaggtgtgaaggtgagtgcagatgttgaaaactgggatgcagatgtgaatgtggttgatgctgcgttgacagaggatgcaattaaagatgctatcacagcatttagcactatcaagggaagtacatctgcttgtacgaaattctctgttcatgtgacgggtacggcaagcgtagcagctacgttaaacttgtccggtatgaccaccactaatttcgcaactaatgattgtattacactggacttcagtgatgttacaggaattagtggtagtaatacgatagctgtaactgctccgacaggttggactgccagcggtagcccgttgtcgtcagccggtcaaatcaccctgacaaagaattaatatcttgtagcgtagcctttcaggctttcccctccggccgggcagggttgaacgtcccttcccggtcaccacgttaaacaaaaaaagtaataacggccgctctttgacatgctggaaacgaaagattatggaaaataatgagtatctttgaacctattaaaaagaaaatggacatttatggaatataatgcgttgatgcgcaagctccctatcggtatacagacttttgagaagcttcgcaaagagaactatttgtatgtggataagaccgaattcgtttggaaaatggctttcgcgtctaatccttatttcctgagccgtccccgccgtttcggcaaaagccttcttctttctactttcgaggcttacttcgaagggaagaaagaactcttcgagggtcttgccattgaaaagatggagacggaatggaagaagtatccggtgctgcatctggacttgaatgcagaaaaatatgactctcccgaacgtttaggtgatattctcagtaaccaactgacccaatgggaacttaaatatggtaagggtgtggatgaaaacaccctctctacccgtttctccggtatcatccgccgtgcctgcgaacaggcaggctgcggcgtagtggttctggtggacgaatacgacaaacccttgctgcaagccctcggcaacgatgccttgctggaagattaccgcaagaccctgaaagccttttacggcgtactgaaaagtgccgaccgctacttgcgctttgtcttccttaccggagtcacgaaattctcgcaagtcagcgtattcagtgatctgaaccaactgaatgatatcagtatgaagccccagtatgctaccgtttgcggcatcacccggcaagaactaattgatacctttacccccgaacttcaacaattggcggaagccaatcgtctgatgtgggaggaaactctcgccaaaatggaggcgatgtatgacggctatcacttctgcgaattttcggaaggagtgtttaatccgttcagtgtacttaatgtttttgatggtcgcaaattcagtaattattggtttcagacaggtactccgaccttcctcgtagagatgctgcggaagtcggagtatgaccttcgcactttgctcaatggcatcgaagctccggcttccatgttctccgagtatcgtgtagaagccaataatccgattccgttgatttatcagagtggctatctcactattaaaggatataatgaacgctttcagaattatctgttggaatttcccaatgatgaggtccgttatggctttatgagttttctcgtaccgttttataccggggtgaataatgatgaccagggcttttatataggcagatttgtggaagagttggagagtggcgattatgacgccttcctcacccgcctgcaagctttctttgccgatttcccttacgagctgaacgcgaagaccgaacgtcattaccaagtggtgttctatctcgtcttcaagctgatggggcagttcacccaagctgaggtgaaaagcgcgaaaggtcgtgcggatgccatagtgaaaactcctaaatatatctacgtcttcgagttcaaactgaacggcacggcggaagaagccctgcaacagattgaggacaaaggttatctgattccttatcaggccgacggacgcgaagtgataaagctgggcgtggagttcagcgcagaagaacgcaatatcagtcgctggctgaatgtaatgtaatccatcctaatgtttcgtttcccgcctgcccacctgcgtgcccccgaaacgaaacattatgaatgcaaaatcaaaaatatggatagtaggagtgtggacgctctgcctttgtgcatgtagcgaccgcacctcctctgttaatgacgagccatccgtatctctccctatcggcttctcttccgacgtcgcctctgcggaatcgccgcaaacacgaggcacagtcctgactacaatcgacaaggtacgccttttcgcctcctacaccggtacggcagactgggggccctcttcttcgtattccttcgactatatgtacgaccagcttttgacgaaagtggcagacggttcatggacctattcccccctgaaatactggcccgtcaatccggctgataaaatcagcttcttcgcctatgctcccgaggaggtaaagaccaaagggtatatctccgtttcagccgcttccacctccaatccgaagttcacttataccttacccgcccaagaaagcgataagctcgatctcctggtagccggcaccttaaattgcacgaatgccacgaaaaaggtgtccctttccatgaagcacgccctgacacaagtaaccttcaaagcaaagaacggagctcccgccaatatcagcaatatcaccctgtcagccgccactgtcaccatgcccggcacgggaacgctgaccttcaactcagcttctgtacccgcttctgcgtcgggcacttttatttggacaccggatacctctaccagcaagctgacaatcttcactgctgatgataaattgggcggaagtaaaaccatttctttaggaaccttcgccgatgcccaaacccttgccactttctttctgctccccgtaggcgatccgtcgacacaggtcaaattcagtcttacctacacgataaccaaaacttccggtccgaacagtggaaacactactgcactgaccaccacgataagcccctccgccagtcctctttggctaccgggtaaagtgctgggttataccatcctcgttatcgatgaccgtctggaaatagatggcagcgtaacagtggaagactttggaaacggtaccgatataggcggtggaggcatcccggctacttaatctgatgcctcaaaccaaattgcaaacagaatctacacccttttcaagatataaatatgaaaaagaaacaatttcccctttctcttctgcttctgctgacggcggcatgcacgagcgaaaatgcagagctacttccgcaaccctcggatgccccggacgtgcttcgcattgcctccgttggaatggatgatggaaaaaacacccgcggtatcatggataatactggcatacaaaccaacggttgccagatcggtgtctatgcagtgaatagtgacaatacagaatacatccctctgcatggtggcagcaatgcatctgtctaccaatataataacagttgttggaacgtcacctctatggacggtagcaagctgctgcgcctgcccaccaatggcaatagttgcaaaatatatgcctattacccttccggtctcgttccggtctatcaagctgccggtggaagctatctttcgggcatcaatgtagttgcgcaagatgatttctcttccaccactcaaaaagattacctctatccgtcagtagctgcaacaacgaatatcaatagctcttccggcgtctcattcactttaaagcatgccttggcaaaactgacgttcaaagtctacaaattagcggtaatgacagaagagataaagttaaccaaacttcagattattgccaacgccaataccctgcaagtgggttcgggaaagacgatgctattgagttcgggaaacctgcagggattggttggtacggatctcatcacattggctgcaagtgacggtggtatggcgcttcccgctcaaaccaacaccataaatttaggaaatcccaagagcactgttttccctttttgcctggtagcccccgcgcccaatgtggattatctctctttccagctgactgttgtgagcaacaaacaggaacagacttacctgacccaacagattaaaatgacctctcactgggcagcaggcaatcattttgtatttacgttggtactgaatggtatgaatgccattatctccggcatgaaacagtaccaatgggaggggtatacggaaacggatataccgatttcatgagattcaggcgcggattacacggattttttatatataaagccaatatacgaatgatgaaaaccatacaacattatttgattttctgttttcttccaaccctgtttacagcttgcggagtgggagataaccttgccatgctgccggagactgatgaatccggaaaattgaccgtcagctttgaccttaatggagcggggatacggatggatgatgccaccgatacccgtgccaatgctaacgtgccccttgagaatctggcagacggaactctgttcagtatacgtgcctacaagaaaacgtacaatgataagggcgaacttactgctaccatctttgccgatgccggagtgtataaagtagagtccggcggtaaaacggcaaatgcctatacgagtgttaccgatgccgtactccaactgactcgtggaatatatgacctttattttctgtcgtacaattcatctacggtatatccgggggcaacgggtgatactgaaacaatcacaggcagtaccctcgccgatgtcacttccaaagacgtgattgccacctccatgaaggatgtgcagatacaatcggatcaggacggacaagtgacgctgaccatcccgatggacggcgccgtcttcagccacctctgctcgcgcgtaaaggcacggctggatatcccccggaaccaaccggtaattgtacttggagtcagtgctctgaaaatcactatgaaacccctgtatggcactgccggttacaactggcagaaggggacactgtctaccaccggcgagaggaacaattcggtagatttgatcgcgagtggcgctttgtccggtatagacagttcgacaggagcagccaccctctcttcttccgatgtttacctctttccgctgaatgatgacgttccgttggaatttgacgtgaccatgacgattgcctataaaacaagttcctcgggaagtcagctctcaggagattttaaattatcttctcccgtcgcactggacaaagcattgcttgccgccaaatcgtactgttttgtattcacgctgacttattacggcgagttggttccttctgacctgactttggatgtgacaagttattcgcccgtgaatctgccttcggatgacgtaggagcggatgattgaattagaacaaaccgaataaaattactccttacaacctatggataaaaataacgaaagaaacttccggcggcatcgcaaaagctgtcgcctgcattggacggtctgctgtctgtccctactgctgtttagtgcctgtactaccgataccaacctgcctgatgtggaacaggctgaccgcctgccgctatcgttgcaaatggagctccccaagcaactcaccgtagtagtcacccgtgccggagaaggaaaggcaacgaccggtaacccgacacggaatgggattgaaataaagaaagtacgtgtaatgcaatttgaccaaacagcgcccgatgaggatacttacaacatacggaaaacctattcgaaagaaactaccggtacaactaccgattggtttacccagacagatggtggtcttatcaccatcaatacaagcactacaactttctggaaccgaaccagcaaattctacattatagccaatgccaaagaactccattccacatcttcgggcgacggtaccgacatcagcgaaacagccaaagaagcagttcttcccaccgcctatttcacattcccggaaagtgacgttacagggaccgaagaccccggtatcttggcttacggtcctgtcgcctataccgaaaaaacaggtacaggcagtggtgatgccaaaccggtagccatctttgcccgcctgaaacgcgcctacgctaaagtcactgtgaactacacggctggtacaggagtcagtatcacagcattgcgggtagaaaatatacctacccgtatctatccttttccagcaactggaaacagcccgacagatgcatttatgaatgttgacctcatcgtcaatgcagggcaaaccacctattccttcttcatgcccgagaacctgcgtggcaacggcacatctaccactgccaaggagaaaaaccagccggacaatggcccgacgcagagcggcagtgcccggaacttggattattgcacctgtatcgtcctgaccggcacgtacaactattatcctaataacacccctgagaatgctgccaaccctatcagcgtagaatatcgtttctaccccggtgccgacatgatacgtaactatgacatcgaacgagggaagcactataccctgacactggacctgaaaggcgccaacagtgccgacgcccgagtgacaataacggacggaaacgtattcacaatcgccgatccggacgacgtgacacataaagatgatattgtgttcggagaatagcttgaaaaggtgaaataaaaaaacaaccaaccaatatgatacattttataaaaatcaaccccttacaccttctgcttcccatactggcaagcagcgtgttcctttcttgcaaagacgatttaaccatcgctatccaacccgtccccggttcggacgatgaagtattggtagaactccccatcgaactggaagactccgaagacggctacgccctgtctgccgacaacaccccgacccgggccacggataatggcagtgccatggacgtgcaactgatccccgccgccgaaacccgtaccggaggaataaacgacccgctgatgacagcaaaaacatccacactgggcagaatacaagttttgcagaaaatgaagaatggctccatcacttccaatgtctataccgatattgctccgggtaagagagccactctgaaattaaatgttaccggtaccgatgagtgcgaactgatcatctttgccagaggtgcaaatacgagtgatcttgccacaactaactggactaccttcgaagttccccaatccgtgataagcggcatcgcaacggcagaccaaataagcaatataccttacctgcttcacctgaaacatgtaagggtcatcaaaagagatgcagacgcctcaggtacaggcaccattcagagcaccaccggcgcagatgtccgtcttcgcctccggcggttggcagcccgactgaacgtgacatgggattacaatgttacagggtacgaattacaacaagtctccctacagaattatcctaccgattacatcgtatatccatcggaaaccgaaactacctatcccagcgttctggcacaattttccacctatatagccacagacgcggactttgcgaataagagaatctccagttggatgccacgcaatataaggggaacagtcaacatcatgcaacccacccatagagggaggaaaatagcccccgtaggcagtgccttcctccgctttgtggcggtgaataagaatgatcccagaaagaaacttacttaccgcgtctatctgggcgccaatgcaaccagcgatttcaatgtgcatgacaatacaaactatacctatcacatcgccttcaagaaccataccgaagacataatacagaccgatgaccgcgtggaataccagaacggcataccggcatccgaaaacaacaattcctttgtatctactgccaactgtttcatggtggagccgggtggtagcttctgcttcgacccgtttacatacgaagtggatggagcgactaaaaccaacgatgtgctgaaaggctggtgcgacaatacggccaaaggaatcagctatgtgaaactaatctggcagactaaggaacaaggagatattggtgaacctgtaatgggctatgccaattcggaaacggatcatagtaacattgtggatatacaacctgtagagtcggggagggatttaaatgcagcccctgctaccgataagggccaatgccgcatctattgccgtgtatccgcaggtaccacgggtggaagcggattgatagctgcctatggtgctgacggtaaaattttatggagctggcacgtctgggtgacggactatcagccggatgccacaggagatgccaccgtactggaacctgagaacaaacggaagttgaaatttacgtttcaagtttcgcaacctcagcttcctatgatggaccgtaacctgggtgccatggcaggatatacaaaagttcccccctctgcagaagagcgcttccggacacatggtttcttctacgaatgggggcgtaaagagccgtttccaggtagttactcgaatcgtgacatcacaagcattccattgccctcaactacgctcactgcccctctcgcaggtatcttgagtttgtacaagccggatggaatctcatttaaggagttttcgattaataataggaatggtcctgtcagttatcggacagcaattcagaatccactggatatttataaacataaaaatgctaataaccaagtgtattggttgaatgatacagaaagaaaggcaaacagctacgcctattttagagtatggggtactaccaaaggcatatacgatccatgtcctgccggatggcgtgtagctcaggcttctgaatattatattttttgtgctggaggtaatacaaaaacaggaaataatcctgccataatgaataaaacctcatatactaccgacaaaggcttcctctttctttttgataataacaaaaacactacttgggttgcactgtcagggtattatcaaggacagaattacagaggaattggagaatttgtctattattggacaggcacaggagcatataagcagaacggaatagacatcagccactatagaattacaacgaataatcaagacttagatgcaagtggttatgagcatgaagctcttccccttcgttgcattcaagaaaagccgtaacaagaattccaatcatacatgaatagaattgaatcctgatttgttattcgcgtaatttgtgttctgatctttattttgagacatccctgcttagctaaacagatcatctgttcatacaaaacacatggtctgtttagtatcagcagaccatgtatctgcggtaaacagaccatgtgtttgagatcgacaaatcaagcctgaaaggcttaaactacatagcgtagggcatcgccctacgtaaataacgtgtatctctgtttaagtcctgaaagggtgtaatcgaatgaattacaaataacaataaccactaaaacaaaaatacaatgagccggaagaattatggcatgaagatgaccgaagaagacataaaagctaaaatcaccgaaaacaaacagcgtcttgtccgccagcaagagcgtgcaaaaaaactgaaagaaagcatggaaagaaaccgtactgatatcaaacaactggaatatactttacaaaaaataaaacgttcccgtctgaaaaacaaacctctcaatttcatcaaacgtcaagatgtttccaccttcttcacccgtatttcccacttttatgattacctgaagcatcgtctgaccaatcctctctgttacgtccgtttctgccttatccttaacgcccgctattgcttcgaaagtcgttctaaaactgctggacaccgactactttcaccggcgacgatactggggtatttcaaaagggagatgggggaactggaaatgccttaattatattgttatcgcttcacccaattttctattttcaagttttcaaatctattcatatggcgaatattttccgttaccaagatacagtttcgttgtattgcggttacagcaatcaataaatcaaaatcatcgactggagtacctttcttacgaagtttaactttctcaatgacatacaaatgcgcaacttcattcactggaacaatatgcatattctcacgaaatttctgcacaatctagtaatcaaaaaataatattcagtttgtattagacttctttgtaccactatatcttatcaatgaaactgtaacatcaaataatgtaatattgttttttcagcttgtatttcaaactcactatctgttgcctaaatccagttcattaaatgttttctcaccctttacccccggtttttccctccccaattttcctgactaactttgccgcatcattaattaaaaacaaataaaatgaaagaacaaagttttgaatggatgctgcaaggctgccactccattacagaaattgctgtagcctattttcccaattatcagtacgactgctcggcggtaaacgcattgcgccgggccataaaagaacacgcatcactgttggccgaattgacggaggccgggttcacccccaaaaccactatactgactccgagacagatattagccttagtccggcagtggggcatgcctttactggtgaaggaatctatcgacaaaaatccatacttatccgtacccaaaatagtcgaaaagatataatgtattttaatacattcattagtatattatatattatgtggttaaaagggtggttaaaaaccttttttaacaaattctagaacccccatcaataaagggtttcagaggggtcggagggtggttaaaggggtggtgataaaaaatccttccaaaaggcacctctccgaactcctaacccctaactaatatgccgatatttaacttcccgcaaccaaataattgtattccggacgtagaagaggtaattttgaagcattatctcgataataggatgtggggcatcctttttgcaacccggttgcatttcctattccctacctttgtatcggataaataaagtaaaaagattatggaaagtaaatgtcagtgttgttgttcacatactcattcgcagagcaaagaaaaagagaaatctatcattaagaagtggtgggctccggtattgtccggtgtcttccttctgttgggtattgtctttcagcatcaggagtggacgtggttcgctaatccggttatcgagttcttttggtttcttataggcttcctgcctgtcggactgcctgtgatgcgcgaagcttgggagagtattttgcaaaaagactggttcaatgagttttcgctgatggcattggcttcccttggagctttctatatcggagaatatccggaagcactggcagtaatgctactctattccatcggagagatgttgcaggataaggctgtgaaccaggcatcccgtaatatcaaggatttgctggatgtacgtcccgaacaggtagatgtgtaccgaaaggggatactaagtactgtttccccccgtgaggtaaatgtaggagaagtgatcgaagtgaagcccggcgaacgggttcccttggatggtagcctgcaaaatccttatgccgtcttcgatacttcggcactgacgggggagagtatgccgcgcaatgtctccgaaggaggcgaggtgcttgccggtatgattgtcagcggacaggcagtacgcatacaagtgacgaaaccttatgatcatagcactctggcacgtattcttactttagttcaggatgcggcggaacggaaagcaccggcggaactttttatccggaagtttgcccgcatctatacaccgattgtagtcctgttggcttttgttatcgttgcccttcctgcacttgttgcggctgtgcatccgggatttgactatgtgttcaatgactggctctatcggggactggtgtttctggtgatatcctgtccttgtgcattggttatcagtatcccattgggctattttggcggaataggagcggcttcgcgtacaggtatcctgtttaaaggaagtaattatctggatgccataacccgtatcaatgcagttgtattcgataagacaggtacgttgactaccggtagtttccgtgtgacgtccatacaggcaacagatatccccgaagatgaattactgagtttagtggcatctgtagaaaagaaaagtacccatcctgtggcacaagccattgttcactatgcttccggacgtggtgtgaaacctgcggttgtgacttctctgaatgaattggccggatacggtctggaagctgaggtggaacaccatcaggtacttgtcggtaatatccgtttattgactgaccgtcagatagctgtacccgaagaacttgcggattgtgtagctacggtagtggtctgtgccgtggatgggaagtatgccggacaactgctactttcagacactctgaaagaggatgcggtagatgctattaaaaaaataaaggctttaaaaatagataatattcaaatgttatccggggataaacaagagattgttaatatctttgcaaaggaattgggaattgacaaagcctacggcgacttattgccggaagataaggccgttcatttggaacaactcaattctgtttcggatatgtctgtcgcatttgtcggagatggcatgaacgatgctcctgtattggctctcagtgatgtgggtattgccatgggagggttaggttcggacgctgccatcgaaagtgcggatgtcgttattcagactgatcagccatccaaagttgcaaccgctatctctatagggcgggcaacacgacggatagtgatgcaaaatatagtaggtgctattacagtgaaggtgttggtgttgctggcgggtgcctgcggatttgccactctttgggcggcagtgtttgctgacgtcggcgtagctttgttggtggtgctgaattcagtccgtatattgagaaagaagttttaagaaatatggaagaaatatatttgcataaattgtccctgcgggatataaagcctacggccatgcggctgctgattctccgtactatgatggagatgaagcgggccgtgtccgtgactgacctggaggataaactcgacactgttgataaatctactatcttccggacattaaccctgtttctttcccatcacctgatacatggagtggacgatggaagcggttcgctgaaatatgcggtttgtgaagattgctgtatgtgcacggtggaagaccagcacatgcatttctattgtgagcagtgccacaagacgtactgcatccgaagtgtgcatgctccgacggtcaaccttccggaagggtttatgcagaccggtataaattacgttatcaagggcatttgcgcagactgtgcagtccaccaaaaaatagacacagaagaataggaaagatattatgagacatttctactacttgtgcttccttttattgggattcttgtccctacctgtccgggcaggggaggctaatcgtgagccagaacaatataccagggagtatattatgaaagattacatgacggaacccgaccgcaccttgcagttgctggatgaagctgaagcaaacagtgcaatgcctctgaatatcgttgacgaactgcgcagcgtggtttatcgcaatatgtacagaaataaatccgctcttcattatgcccgcagggcttatgtcagtgattctctgtcacacgatgacccttcgcatttgttgaggatgacggtagccatggctgaactgtctcatctgctaagtgaatataaggaaagcatgcgttatgccgttcagggtgtggaactggcgcgtgagcttaaggatatacagtccgaatgtaagttattattttgcatgggggagaacaaaagaatgctttccttcaaagaagaggggtatcagttctttgatcaggccattgacttgctcgataattctaaaaatgaagaatatgagacgatgctttcctatttttatggagtaaagatgggctatctgattgctgataagcgatcaaacgatgccttagaaataggtctgcaacgtgaaaagctgcttgacaagatgagtaaacaaccggaaattcgtgcggacctattggatctgcaatttgcgtatgtatattccaaattggcctatctcttccaattaacgggagaccgggagcgtgcggctgtttattataagaaatatcagtcgacaaatgcttcttctactcctgatggtaaatttgattccactccctatttattgcttttgggagaataccaggccgtattggataattgtcgtgattttaaggaagtgatgcgtgagcaggatacattgaatagccagtatctcactatcttgaatctggaaatactagccaatactaaattagagaactataaaacggttataaatcttcaaagggtgatcgctgcaataaaagatagcatttatcagcgggaaaaacagaatgctgcactggaactggatacgctctacgagctgaatgagaaagaagcccgtattgcagagcaggcgtttcagttgaagatacgtaacattacgttgatatgcattctgagtggtgcgttgttggcattgttctttttgtggagactctggcatcagaactgtgtaatcagaaataagaataaagcactggtaaagcgtattaatgaacaattctccatgcaggaggaaatggaccgctcgcaactgggcgtagagaaagatctttcttttcccgaaaaggtggaagacgaatccggtgataacgaagagcaggataagcagatgaataagatgatttttgagaagctggattatatcataaaacgggataaattgtacctttctcccgatttgtcgagggaagagctgaccagaattgtccgtatgaataatacccgttttgccaagatgataaaggagaatacggatactaacctgagtggatatatcaataacctgcgcttgaattatgcgatacatttaatgaaggaacaacccgattatactttgcgtgcgatagctgaatcatcgggtatcaatagcatgcccacattccatcagttgtttaagggaagaacgggaatgactccttcggaatttaagaatgctcaaaagaatatgggtatttaatgtgttgtgtattaggtatataatacttttcttaataacttttggtactatttttaataaccatataaaatatatttcaaggcttatctgagaattgagttcctttgtggttcaattataaggataacctgaattatgatgtatattttatatttaataactctgtttgccttcattgcttcactgatagcggcagtctattatttccgaaaatataataaacttcgcaatcgtctttcagggatatctattgatggtaaacaggaattgatgaagccctataatctcttgatccaggaattggaggaaaagcagcagcaattgaaacagcagaatctccaacatcatttgctggtgaaggcaattaatctgaaactatggaagtgggatttgaagcgtaaagagattatttgggaaggaaacctggagaaaggggagcagggaactgtagtagtagatgtggatgagcacctgtcgcatgtattgccggaatacagaaaaagaatctatgaagcgatagatggattggagaaaggttgttccaagcttatcgatgaagagtttttataccagaatgcggacaatactttatcttggagaaatatctatggcgccgtatatgagtatgatgaggacggaaaacctgctattctgattggaggtacccagattattgacgagaggaaaaagctggaaagcgatttgcggaaagcgaaagacaaagcagaggaagccaatcgactgaagacggctttcctggcaaatatgagtcacgaaatccgtactcctttgaatgctattgttggtttctccagcatattggcggatactgaggatatagcggaaaagaaagaattttgtaatctgatcaatcacaacaatgcgcttctactgaaaatagtggatgatattcttgatatttcgaagatagaggcggggtatatagatctgcatcccacgtggttctgtctgtccgacttgataatggaaagtgctaccgagtacaggatgaaagcagccggaagactggatatccgtattcataaaccgagacagggctatatggctgaactggatacaaagcgtgtgaaacagatattgaataacttcttgtccaatgctttgaagcatactcaggaagggtatattgatattacttatggcgttacagaacaaggtattgagataaaggtaacggataccggatgtggtattccgcaggataaattgcctgttatttttgaacgttttgaaaaagtggactcttttaaacaaggagttgggttagggttgcctatatgtaagtccattgcggaatgtatgggtggatctattgggttgacttcggaagcaggtgtaggcacaactgtttgggttacattaccttgtagtactgcacctactcccaagttatacaaggagaagttaatcgacaacttctattcctaatcctgtaagcaacccttccagtccgtagcgggagaacttcgcttttttcagacggttggcagcaggatttaaagtataattgcgggcagtagtgaaatctgctttttccaggttggtatgatggaaagaagcataacagaggtcgcaatctttaaatactgcattggaaaggtcggtttccataaagtctgtgttttgcaaatcgcaccctataaaacgggttcctttcagtttcatctcagtaaaaagggcgtatgacaacagacaattatggaattccacagacaagccgaagcggttgctgaggctgaagttgatgcctgtcattttgcaatcggtgaacaggacatccaaccaagaggtattactggtttttactaatgaaaggttgcactctttgaatgtacatttttcgaatataactcttccgataggcttatctgaaaagttacatttgtcaaatgtacattcataataatttgtttccagttcctcgatggagaaatctactttttctatggtcttgtcttccatttattttttcagttaattcattgctttgaatacgggttccggcttctgtatctccgattcgaaaccaaaccaatagccttgattggtttcctcattgataggcaggaaacaaaggcggagattctctttgtattggccatacagtacttgccagttctccgggggaacctgccgtttggtctttaccttttctgccggaagttttttcagtgacatgccggcctctatccaggcaatgctggcttctaactgatattctggatagttgtgcttacagaattcatacaggataagtcctcgtttttccagacttatcggttggtctatcaaacctatttgtatcaggtgttccaggaaccgatacaggaatttttcttctttcagaatgagtttacgggtgatagattgccaggctggagtattataaaatccatccagcaggcgggagagttgacgggctgtttgcaattcacttacattgacctcgcgggtttgaagcacttcatagggtggtaggggagaatattggatgcccaattcttccgctcttctacgcatttccgtaccggggagtaatttgagagactccagttgtatttctcctgcaccgtatgctgccagaacacggatatcttcgaatatttctgaaagatggtagagtgggagtcctgctattaaatcggcatgtgtttccatattggggagagaacacaggaatttcagaccttccaatgcgtctgtcagctttcccatcctccggcttttttcgagtacaggttcacgcaggctttgtatgcctgcttccaggtgtaacagaccttcgggcaagtgtttcaattcttctttcagttcttcggaaagaagtgcagggtgtatttccagatggaagcgtatatcagggtggtattcaagaaaaagctcaagcagttcttttgcccggcgggtattgtaattgaaagtacggtcgagtacacgcacgtttttaataccatgttgatgaatgatttggagtcgttcgcgaatagcttctatggaaagtgtacgtacaggcttttcacctccgctgacacagaatgcacaggtgttgaaacagcctcgtgtcgtttccagctgtacgaatggtttgctccaattaaagaagcggcttttttcgggaggtatgagatcagagaatttcagtacacgtgctatgccgttgtctctgtactgcccgttggagtcgagataacagagtccgggaatggtattccacttttcctgttcgttccggcatgcgagccattgcgggaacacttcttctccttctcctctgaatacacagctgacataagggttcttatgtaggaagtattcattgtctcccaaatactcagggccgcctaatacaatgcagcattgtggcaggagtgcttttactcttgaaaggatgtggagcaattgctcatggttgaagagccaggttgtagcggcaagtatgtcaggttggcgatggtagacttcattgacagtcagccctacattttcattgatagtggctgatacgatatcccattctatggatgtattatcagcaatctgggcatgcagtgccggaagtgccagggaagaatgtgcgtatgaactgttgaggtcgagccagagtaacttcattttatatagggttgggtttacaaaaacagttgcaaagataatgaatgtattcctatctgcctcttttctgcctgcccaatcctttgctttgccagtttacggtatgcttttttagcctgctttaagtccgacaacggatattctgacgcattcgctgggaactaatgttagtaattcatccaggaactcacgactgcactccaacaaggtttcctgcatcatttcttctttagaagtagcgaagaagtgaaacaggttatcagaatcaggaagtttctttactgaatagactatatccgttgatttctcattgtatgcttgcgccaaatcatcagctcttgcccagaattgagttgctttgtcaccaccgatttctacgactgcaattaatttttcgtttgtttccataatcatttattttttagttatacatgttgtcatactaatatcaggagtatattggttaatactctgtaataatatccgcaaatcgagtgccagcaaacagaaaataagcgtaggattatctactttcaacttttttaaactaaaagactgtttgttgtacacctgataattccgaatatttagataacaattgagccttttttatggttttggacatttactttttttacagaaacatgggcatacaggtgcctgaatttatactaactttgcagtgcttttaacgagttaataataaaatcatttttaagatgagaacacttcaagaagaattaaagtgtatgcgcgaagggcttcattacgatgctcatactcctgaaatgtatgcctatcgggctgaagtaaaaaagaagctgcatcagttgaatgtgactgaatatcatacctctaaaatgccggaggttacccgttcacttttcccgaattccgctccggatttttttgtagaaccacccttttattgcgattatggggatggtatatatgcagctgaaggagtttttatcaatttcggtgctgttattttggatggtgctaaagttactattggccggaaaacgctgattgctccgggagtacatatttatacggcgcaacatccgcttgatgctgacgaaagggatgcctatgagaattgtctgccggtaaccattggtgaacgttgctggattggcggtcatgcgacaatttgtccgggagtgactattggcgaccgttgtgtaatcggtgcgggttcagtggttacgcatgatattccggcagactcgttggctgtgggaaatcctgctaaagtgatacgtaaattgaattagaagtaatcctgttattgggggtgttgtttgaaatatctgaaaagcaaatccatcaattctctctttttgacgggttttgtcatgaaatgattgcatcctgcggctaatgcattctctctgtcggagtcgaaagcattagcggtaagagcgataataggggtagtttggttaaattccctgatgagggaagttgcttccagtccattcattaccggcatccgcatatccataaagacgatgtcaaaggtttgggctttgattttctcgatagcttctactccggttatggcgcgggttagttgattgtctttaagaagtttcttgattaacaggtaattgctgtcattatcttccgctatcagaatattcagatctttaatctttactgaggaatctgctgaaaggtgttctgtacttttgttatttaagtcctcgtctgcaacctctgatttttcgacatattcgacatcggtatatccgatgtaccagaactcagaacctacattggctttggacttaaagcctacttctccgcctgtagcatcggcaatagctttacagatagaaagtcctaagccggttccttgggcaaaagtatctaatttctcgaaacggctgaagatacgggtctttttctcctccggtattccgatgccactatcctttacatagattcttacctgtccgggcatacattcgtatcccatcacaatttcaccttgtggtgtatacttaatggcattcgtagcaaagttcgtgaatatctgcataaagcgatatttgtcgaaatttgccacacatttggtatatggattgatgagtttgagggtaacttttgggtttttaatccgttgctggaaggaccggtataattcatcgcaaagctggcacaaattcagtttctgacgattgatatcaatggagccgacttcaatttttgacagatcgagaatgtctccgattaatttcaggagtatctcactgttggtttcaatcagttgtttatattcaaatttttcttccgtatcatctgtttcggtcagcaattcagagaatcctacaattgcattgagtggagtacggatttcatgactcatgttagcgaggaatgtagatttcaatttgtctgcttcttctgctttgtttttggctgtaatcaaattttgctgatatataatgtcttcggtaatatcccgttgaataaatgtgatgaccactacattgcctgcttcatcttctactgcactgtaggtaaagctggagtaactataatctgttgcattgttttccagaactcttaatataattctgttttccgggagcttctgtttatgagcaactgcttccagcaatgccatgaatttatgtctgtcatcaggatgaatactttcgtatatggattgcaacgattttttctcaatattctcgacatggacatcgaatttgcaaaacagaccttcttttatattgtagttccatgaggatagcttcccagcattcaaagctaatgataattccttttgtgttgcttttatcttcttgtaactttcaatgatttcccgctcttgtgctttctttacggtgatgtcttcacaggctaataaatagccttgacgatttccttcgggatcgcgcatgatagttactttggtaacaaagtattttttgattcctttgatgggtgtttcgtagaagttttcacaaagatcgaaatcataatcggtttcaaaagagacgttcaacccctgctttaggagagttttatcttctgccgtgatgttagggtcatcgaagatattaatattataaatatccttcatggttacaccgaacatttttagtgtggtgccattggcgtatttcagatatccatctttgtcatatacgccgagccctaaaggtatgtattcaggaatgagcgacagaagttcattttccatgtttattattgcacctatgatgttttataacgtggtgcaaatgtatgcaaattcccggaattttatgattatcgtggttaatatttgttggaagctggtcggaatagtaaactttaacatagaggataggaaggtgttataaacaaaaaatcctgcaagtcataaacttacaggatcttttggggtgactgatgggactcgaacccacgacattcagaaccacaatctactatataattatgcttatgtctgtaattgtcagtaagttaatactctcttgaattagtcaatagaacaactattgaccaacaatggcaaggtttatacattaccaatactagcacttggaagtgctaagtttcttgtttcttttccataattcaattctttattcaaagtttataatgtagttatcgtatatcactagaagaggtaagctttaagtgatattgattaatcttctcttcctattaaatgaaacacctaataattagaataatagaaaggccactaaccaagggtatagtgagagttattctcaatatcaatgattagacatttgagtataaccacatatctgtagaagaatcaaaaacatagatttatttgtttacataatcatacaataatataaaccatctgcgtttattgttgcactttttatatctatacagtgctttgttatataattcttcatttaacaaataccctctaccatcattatagtttctataataatcactaactgtaggctctctaaattttacagtttgaaacaaccatataattaaccaaagtaagttaaatatagcggctaatataaaccataataacgtattttcagatgtctgttgtatgtcactcattgttaatgtatatattaagttctttgaaatcaataatccatttattttctattaggaagtcagtacccagtaatccatgtacttgtattccattatcttcttcaatacctttaaaagcatctgatagtggctgtacacagaactttggcttataggtataaccttcaaagttgaaaggtagaataaccacatctaccttatgcctagttccatctattccactgatgtagtaatccccaataggctctactatatccttgaaatattctactacattactatcaatcaaacaacatgtacttccagtatctaagatgaaacaaaggtgcttatcctctatctcaatcgctataataggtagtttagtttgattaagttcatgatataaggaatgccatatattcatctatattttgactctaactatatcactttctccttctttctctaatgttagaagtttggcttgtttcatattaacaatctctcctacagttgtattagaacttttatcaagtgggatatatgtgcatctaccacctagtttcattgtaaactctactgaattaccatattgggaggctactactatagcttgactaacagcatctatctctttttgtgtaaactttctttcttttttcactttccaagtaacagatgggatgttgggctgtaaagctttttttagaagtcctttcttataaaactggtctatatcatgatacattatattttcatgaacccaaaacggaaacttccattcttttcttataatgccatttaccctatatacaattatattgttagtagctactatttggaagtaaaattcttcccccttattatttgcaattagtaaacttgaagcagattcttttataactttaaaatctaagtatgacttaaatttctgtcgtagagaaatccaaggaggaattgtagagcaacttgaaacattagtttctctttcttctctatctattttcttttgatagaggtgatgcaaccatataagaataatgatagcaataataaaaatagtccaattcatattcttctttttatagccatatcacaaaaaaagtgtggtactttcctgctgagtccaaggtatcaccacaatacctacaatcacaaacaaggaaagcccacacctgatggtatgagcattcactcccttactgctgtgattgttagtctttaaagtggtgattttaggacttcacaagtaagaagcaaacacttctttttccaatatgtcttgttaaacttctatttcattagcaatcttttgattgtttctgttgcaaagttaagactttccacatataaacaatcatttgaaagctacttttaataggtctcaatccatattagtaccataggcatgggctatgttcttgtattacaaagttaatctttatttcttagtatctctgtctaaccataggtatattgctaaacctaccatactaaatgcactccacttcatcattagataaaattctgtcataattcaatcatattaaaagccccaaccttattataggctgaggcttgaacaacaataaactacaatacatgaggctttaacctcactgtaaatctattaaatactccttcatctaactaccttctatttaacactagaagaggtataaattaatgtggtggccattaatctaccttcaaatctcatttttcagagctaaaaggctattgtgtacatctaacttccagtatataatagaaatttcaaaagatacatgtacactttttccagttagcctgaggcacttgaaggtgttaggttattgtatgtattcacttctatttttcttttataggagaagtgaatacaaatacctgtttcctcacttacttcttatttattaataaggatgtaagtgaggctaactggaatttcctaacataatgggtataagaagtgagatgaggtaggagttgaagaggtaatgttaattataactggttactggataaaccaactatattcattagtgccatacagtgccttatttagcccttctgtaagctgtgtggcattcagtgacctatccaagaagttatctatatagctgcttttattggctccagtgagcagattatatacattccacatggatatggcactctgattctcaggaagagcaaagttatcatcattataatatgctttagcaaccagtcctatttgtgtatcagtcatcagcatttgaggaagccttttcttctgttcaactgggagatattgatataatctactctttcccaagaactgtgcaaactggctttcagtcatatgactatctttatatgcactcatgtagtataggtgtttggctatgttgtattcttgaaatagcctcatcactgaactaaataaatcagcagtactcatcacctttaactcagacttgtaaccatcagttgagacacacatattacagcaaaccatgttcttgaagcctataaataccttgaatttttctactcctttcttactgtacagattctcatgattatatgcccttactccaccaatagtaagattcaatctattgcccattatatcttcatggatagtgggaatctcaaagcagaacatcattctttcatagtaaatagtcttgtctgattcaagtaaatccttcactggtttatgaatagcttcgggtgttctgcctttaatgacatggcttactctgattgcaggttctttaatcctctcattgggaaatatctgattggcagcttcccaaaccatttcaataaatgaagggtgactgatagttatctcattatccttactgaatactggcactacacattcttcccttagatgctgtatagtgacttctttggtgttggcttctataaaaggcaatcttttgttttcctttctggagctgataaattcagcctctatagtttcaactggggtttcaacctcaaactttggctgattgaaggtttgcatcaacatattagttctgtgtactggcattaactgcattgcttccataatgtataaaattaggattatagttgataataggtttgttattctcttcttgtaactgcatcttcttctgcatgaaatctgatgtaagttgctgataccattcagggtattggtgataaatggaggtaagttcttcaatggttttagcctgatttatcttttgctttatcatatccaagtttactccattattgcaccagtccagtattatttgcccagtagtgggtgtaatagtaaaatccggtttgccaataaatagacttgttctatcctttgatgcaatggcttgatgcttcatattaatatcaaggactatggtaaattcataatctattccatccctcatgacagcctttaaccccactttctcaggaatcatcttgccatttttttcactaagaacataatcctgcttgcacctcatggtacaaataacatggcttggagattgtagaatcttctgcatgaaggcattcattcttggtgtaatcttctgccagttagtgaatgaattaccttgtaggttggcatgatactctagaagattatcccaacattgggagatactatcaatgattatcacctccattttagcatcctcacacacctttatagcttcaatataggtttcaggtgtgaaattatcttgaaggggtaatacattgtaatttcccaagtgtgcatataaatcagcactcccattttcactatcaataatggcaattttggtccagtcatttgtcagaccataggctaataatagtgcagaataggttttaccactacctgcacagccttgtagagcaagctttatcttagcctgcttctttgatgatactcttaaattcaacatattgcaatttattaattgttgaagattcatgaataaagaaaaaagagtagttagcctttcaactaaactactcttcaagtgataagcataacctttataaagttgccaaggtcatacactcaccttcacccttctgatgaagcatatagaacatatctccagtatcaggtgaacatacttgtgagataactggattagtgatttctccattaataaacttatcactcactgcaccagtttcacagccatatacaaagaagcatttacctgtgtgtggattctgctttacttcaatagctgtaacttccttctgagacttaaactcattgatagtcattgtctctaaaaactttaactttcccataatcttgtaatttaattgttgtacttaataaggtagctctaactttaactaccttcaagtgcatagggggaagtaatgagcaatgctgtttgtattagtgtaatgagcatcctattttagttcattatccaatctactttaacttcatccccacaaacatgatagggggagtagcccaatattgcaagattagggggctgttgatgctaattaagtagcatatagacttataaaaaataaaataaaaaattggataatacttgaagtgaggagtaaatatagttatgtattgctaatggtagtatataatgatccccagtctcaatgggtgaaaactggggagtttggatagatctattcttatataaatactattcatcaatagataaaatatttgacttaagatttggggataatccaatactctcagtaagtatttgctgcattatgcttgaaacaaaatcagtataatctgatgtggtacaaattgaatcatgaatagtaaaaacaggaacttgttgattaccttcctcccaaattcttttgcagcatctatgtagaattatctcactttctatactttgcaaaagacaagataatgctgtatggtcattttttttagttaatgagattaagtcatatattgatggaaaatttctacgaaaatattgcttacattttggcataaatcggttctttgaaaatagagttgttaaaatcatgactttgatatcatctctgaccaaagtagtgttcaagtttctattaataacttgtagcataaactcatatactcctccttcagaggctttctgtacataattattcaaagattcatttctccaatctaatgaagtaacataagtctttatctcctctaaatgcacctctgtaaatttttcctgtacattctgaggaagcataccgatattaagtgatatttctgaatttttatcccaaaacaaaggatttaataataagcaaagtaaatagggctgactattagaaatatcaatattaactaatggggcactattgtagttcaaaaatctgcgatatatcttttgtaaattggttatcactgaatgtaatctatgaacattagtatcaatagaaaccttgtaatctccaagagcaatactattgatattatgcagtgctgcatgatactgggtaaaagggtatttccttttaacaaaatttccacgacttttgtctctgtttatatcccaagactctatacctctattaaacttatccctcatgacagcaagagcataattttcagcagcttgcttatctatatgtagttctttttgtgtataccaatgtgtcaaataaggatagtctattactgtattagatataaatttgccattttcttcactatatatttcagcaggaatagcctctactgattgttgaaatgcgggatagtcataccttactaatggcatacttgcatacctttcagtaaacttgtagcctttggacttctccccttgaatgtattgcccatcagtgcataatacacccgttaatatgagatagtcaaggtagggcagatagtctttaaaggcatttctgataatggtagagttgataaagacatagccatcctcagttattgaatctttattcttagcaggaatagaactaacaagacttatgatatagataagcctatccttatcaaatactgcaccaacagttccattcaaattgactgactttatatgtcctgcattatctataataaatttataatcagtcaaaggataatttgctaaatgagcatcaatattaaggttacttggtatcatggcaaaatagccagaatgctttaactgaatacctaaagagctaacaataatatgtatgggctctaaggaggcaaaatatttttttaattgatattttctatataaccattccttacattctataaaatctatcttacaatccatatctatccattatgttaggaaattattaatagggcaaatataataaagaatctccataaccctattagttacagagattcttttagcactacttcaactcttcacttccaaatacatatctaagaaccttcaagttggcttcattttctatcttgaagtctctttcaatgtatatatctgtgactttcatagcttcatcaatgtgattaagtgctgcatggactgtatatttgtctatgcctactttattgactgctaaagtagcccatgagtgccttgctgcatagtattccaaatcatctatattgagtatttttcctacttcctttaaaccaatattgatagctctgttaaagttatttgcagtgttgtacatttgatagaatttgaatactcttttgctggtatgatctttatacttctttacaagtgacagaaggatagggggaattttaacttgcattttagctctatcaagtctccttctagtagtcttgcttctgtagtaggttataatagtgtcttggaggttgtcacaattgtataagtctatagagttcattcccattaaacagaaggagaggatgaagcaatctttagcaagattataaggacagattttttccttaccattactaatattagtaatatggggtaattcccatatttttctgattaattctgctgataatgctcttttccttgttgcttcttgtttaggaactttgaagttctcaaagggagagttagggatgataatgatacctctgtcatagtcattgtattgcttcttagcttcattaaatagatgtctgatactgcctaaatagagggaaaacattctgttagaagggattcttttaccttttctttcaagttctgctatttgcttggctctcttcaagtgcagatactccatgaaaccttttaataaatcttgagtaacttggcttgtggttaaatgctccttgcctatataagctatgaatgcattgagtgctgatttataattcttctttcctttgctttctgtggtttctaaccactctttacagaactggatgaaatctatggttttattcttctcttgacttattcttatgtgctccaatatctcatctatggtatatgtggatgcatccaagggaagagtagcgcatatctcttgatactgcctgactaggttgtcagtctctttaataagtttgggattcttcaatttgagtgacttggtaaggtcacttgctctaacaaagatattagttgatagtcttttgacttctctattataagtcattctaatcttcacattgtaagtgccatcagatttttgtttgctttttaatatttctgctttgaatgtcagcatgttaactcctgtattagggaacaacaatagaccaacaactacagatttaggagggatttatctcaaaatttagtagtaatataatagacttgtataaagagaaaatcctcataagtgcttaacttataaggatttctttgggtgactgatgggactcgaacccacgacattcagaaccacaatctgacgctctaaccaactgaactacagtcaccatgtttgcgtcatttctcaaacgcggtgcaaagataggtattatctttgatactgcaaatatttggcgaaatattttattgaaatctgcattattttttattctccttaattcctacattgtgctgttggaggagctttcgggagtttttgacgaagatattcagatggttacgtgcagcttccgggagctttgaaatagatgtggaatctgtaggataaagcacataatttttttctttggtgagattgggacgtgctgtccataccaaattatattcgcaacgttgtactcgaacttgtgtggaggtagatgttgtggtgtctctttctaattctaatgtgaaaataagtcctccgtcagtatttactttactcatgttggagatgaaattccctaaagaatatactacagcgtgttgtgctccggtaatgctatcggtgcgtagttccatcggttgtataacatgaggatggctaccgatgatatgggtaacgccctgttccaataaccaatcagccaactgtcgttgttcgcgactaggtagcgattggtattcgtttccccaatgcatacagacaatgataacatcaggttgccatgttcgtgctgtatcgatatcctgtaacatgattttcttatcaatatagttcactatgttgggagaggatggcttaaccccattggtatcataggtatagttaagaagggcaattcgaaaaccgtttttgtgaatgagtaatgggtatcgttgacggcgttcttcttcatttctataagttccggtgtaggggatacgtaaggaatctaacattaggattgtacgttccaaaccttttttacctcggtcgagacagtgattgttagcagttaacagaacattgaagccgacctctttaatggcatataaatattcatcaggtgcacagaaagcaggataaccactataaggttttccaccgataggtacttctaaattgccgatagcgatgtccgcctcactgatttgttcttttacgagagagaagcagggagagtagtcataagtccctttatctgtacgcgcagcgtcaagctgggcttggtgttgcatcagatcacctacaaataatagagtgatttttgcaggggggattgtatcagtggattccggtactacttgttcctgtgctgtgctacaacacgatataaagaagaaaagtaatgcaagagggattgtctgtctcatgactttgagcggattaaggttccactggataaaataaataccgaaaggagtcaagttgtcacaagaggctccttccggtattcggtatttttattattgatatattgctttcttaccagccagcaatgtattcttcatcaaagaaacgatggtcatcggtcctacaccacccggcacaggagtgataaatgaacatttcggagcaacctcgtcaaacttaacatctccagtcagtttgaagcctgatttttttgtagaatccggtacacgtgtagtacctacatcaataactacggcaccttcttttaccatttcagctttcacaaagttgggttgtcccaatgcagcgatgatgatatcggcttcctggcattcttttacaagatctttactccggctatggcatacggttacagtagcatctcccggataggctttctgcatcatcagtgcagccattggtttaccgacgatattactacgtcccaatactacacacttcttacccgaagtttctatttgatagcgtttcagtagttcaagaataccgttaggggttgctgatacatagcaaggcaatcctatggacatgcgacctacattgatgggatgaaacccgtctacatctttacgataatcgatagtttcaatcactttttgctcagagatatgcttgggtaatgggagctgtacgataaatccgtcaacatctgcatcttcatttaattcacgtactttagcaaggagctcttcttccgtaacatccgcttcataacggatgaggctggatttgaatccacaaacttcgcatgctttcactttggcagcaacatacgtttcgctgccaccatcgtggcctacaagaattgcagcaaggtgagggcatttgccaccttttgctacaatttctgctacttctgcagcaatctcctgttttacttgttcagagattgcttttccatcaattaatgtcatataaatatttttgttttgattatagtttatcttgcattaggggtctaaaagagtatcgcaaatatagagcaaataaccgaatataacaacaatcccgctgacttcatttaaaatatgaaattagcgggattggtatgcttacagtttatctttattatttcatcttcggcatcattttgcccatcttgctacccgttaccattttcatcatcttgcgggtttggtcaaattgtttcaacagacggtttacttcttgaatattcgtaccactacctttggcaatgcgttgacgacgcgaaccgttcagaagagccggattactgcgttctgccggagtcatcgaatagatgatagcctcaatacttttaaatgcattatcatcaatatcaatgtccttaatagctttacctacacccggtatcatagaagccaggtctttcaggttgcccatctttttgatctgtgcaatctgactcaagaaatcgttgaaatcgaattgattcttggcaatcttcttttgcaggcgttttgcttcttcttcatcgtactgctcctgggcacgttccactaatgaaacgatgtcacccataccaaggatacggtctgacatacgtgagggatggaattgatcaatagcatccagtttttcacctgtacccacaaacttgatcggcttgttcaccaccgaacgaatggaaagagcggcaccaccacgggtgtcaccatctaatttagttagtacaacaccgttgaagtcaagtcgttcgttaaactcttttgctgtgtttacagcgtcctggccggtcatggagtctactacgaataggatttcgtttggattgattgcttttttaatagcggcaatctcgttcatcatctcttcgtctactgccagacgtccggctgtatcgacaatgaccacatcgtatcctttggctttagcctcttgaatggcgttttcggcaattttcaccggattcttgctgtcaggttcagagtatattggaactccaatttgttcagctagtacgcgcaactgttcaatagcggcagggcggtatacgtcacaagccaccaacaacggcttcttgttctttttcgttttcagcattcgtgccagcttacctgagaaagttgtcttaccggaaccctgcagaccggacatcaaaataactgccggctttccttccaaatcaatctctgctgtttcgccacccatcaattgagtcagttcatcgtgcacgatttttaccatcaactgactgggctttacagctgtcagcacgttttgtcctaatgctttttccttaacagtatcagtgaaagttttggctactttgtagtttacgtcagcgtccaacagtgctttgcgcacatctttcagggtttccgcaacattgatttcggtgatctttccttcacctttcagaattttaaacgacctttccagtctttcgcttaaattatcgaacatgatgatataattctatttataaattacaaattactcttattgaggcgcaaaagtacaaaaaatccacgtatctaccttcatttaaggcaataatattattcaaccgaggtagcgggataagtgaaaagaatagttggaccttctttgctatcggggattacctgatatgtaccgccaaagtgttttataaacagacggttgacatcattacgcaaagcagagtcttgattggcatatttgaggtctgcgagggggcagttggtgattttaaaacgtaatatttctccgttcttgttcagagtgaagttgagatcacgttcttctttgaaagaagcgaatggacaagttagaatactgacaacgaattgcatgaaccggtttgtgtctgtatggatgatatattcgtcaatgttactgatgaaatgagtatgcaaggtagaattctgcatatgtgccattcctacagcatcgttgcagagctgtacgatgtcataattactcatttggaatttcatcataccggcttccaggcgcgacaaatcaaggacattgttgactaaacgcattagctgatccgtgttttgctgaataatttccgcatattctttacgggtttgatcgtctatttccgcttcgtttgctatgatttgtgagaaccccaatactccgtttaggggaacacggatggcgtgactcatattggagaggaaacgattcttcatttcattggcttcttctgtctgtcgtgtggctttatgagtttctttttctgatatctttaatgcttttcgtatcagattgatgcggaacatatagccgatacataagatcaagatgattccgaggctcaaaagaatactggtttgtacacgatttcttagttttccacgttcccataccaattggttcagatgatgtatttctttgatttcctccagttgtttagctgatatggcagcagtcagtgaatcctgaatatgattggaactttcgtacagtggcagggcttccgcatatttacccatttcttgcagaatgtcagctttccgcgataattgtttggcatactccatttgggcagattcaaattgtttcatctttatcagagcagaatctatatagagaagtgcagcctgataatcttttgtatgccggtaatactccgcacttgcatcatagtacagggccatatagggaatataactctgcggagttatgaagtcttgagcttcttctatatgatatttagccgagtctatctttcctatccctgtataatagtaagtttgaaatatttctgagaatagataaagattgaaatatgattcatacatatccggatctaaactaagcattttttgcaatagctgtttgttttctttcagatacgtcttcaggcttgaatagtctttctggtctttactgaatacaattagttgattcagaacattaaactgtgtactgctggttgtttgttccgaaacatatttgtgagcttttcgaagtgcttctccttcttcttttgtacggttggtttcatggtatgcacttgccagacatgaataagcagctatacggccgtctgtgttattcagttcttctgctttctcaagcatttttaatgattcattgatggcatattcatatttctccttatatgtataagtataaataagcaatttttgtgcattgaagtacaacctgaaaaactccatgcgtttggcaatgggtttcacgtagttcaccagtttactgacactatcgacttcattcttattatagtagtataatattttgaaatatgtactgctacatatatatttaggattcttttggcgctgtgcttcgttgaacatttcttcagcatattctatataatgcggagagttttgttcagtaagcacgagtttctcaagtaattttaatcttgtggtgtcatgcggaagtgcacgtagttcgattaacagactgtctgccacagatgatttttctgttatattttctgtaaatgcgaggaaactttgcaggaaaagagcgagtattaacaaggtttgcttcattgcgctgcctcctttctgttgatagagcgaattgggtgagtaaacaagaagcgggaaccatccttatattcaggatctatccatattcttccaccgaaacgttctacaatcaattgacagatagagagtcccaatccgctgccttgggcattttcattcagcttttcaaaacggttaaatatctgtccctgtttttccggggcgatcccacaaccggtatctgtaaccgaaaacacagtcatttcttctgattctttctccaataataaggttatgctaccttctgtggtaaatttggttgcattaatcaacagattgataagtaactgctggaggcgtgcttcatccgtatagatttccattttttcctgagacgtttggaataggactgcggcggatgtttgctttatcttctctaccgtatccactacattgcgacaaatagctactgcatcgctgtttccaaactggaattgcattttcccgatttccaaactggaaaggtcaacaacatcatctatcagtttcaaaagtaagtctgaattttgctgaatgatttcattgcattgttgtcgggttccgatgtcaatattagcatcggtcagaatagatgagaaaccggacaaggcatttagtggagtacgtatttcatgactcatattcgacagaaaaaggctcttgatacgaatggagttctcagcactttgccgggctttttccaatttatgttgagatgcaatcaagcgtgcattgattttacgaatataaagtacggatacaatagatatgcctagaatgaggatacaacctataattgaataaaaaagcagacggcttcgctcactttgattatccatctcgagacggtccacctgatatatggttcgcaacaggtttatctgggtggaataattacgggcattgatagaatctcgtgcaatattgatgtcttgaaaaatggcacatgcctctctaggcctgctttgtttggtatacaggtgtgccagtgaattcttcattttcaaatatctgttatagacattggcactactggtattgatggtcagctcattatataatttgatagctagttcgtcatctccaattcttttggcatattcagcttgtatatatttcaggatagaactatgaaaataaaacggatagtattcataccattcttctgcttcctgaatatatttccggactttatccatatcattattatggaggtaataatatgcttggaagatattttctatgaaacggctgtgctgataatcattcatttgttccatttgatccaaataggctttagctttatccatcctccccattctgatgagggttggaattagttgaatcaagactttttcctgtaatttttcggagtcggatactttatgcaatttctgcatggctatttcgtattcttcgatagcctcattattcatgttggcattaagataagtatctcctattgcataatgggctatggctatgccgatatcgtatttcatttgagtggcctgtttcagcataacatttgctttttccaacgcttcgttgatgtggccgtctgaaacgagggcatatacagccatctgctgcataaggaacatgtatttatagtcctttctgctacggaatacttctacaagttcattttcccattgggcgatatctcttaatctgacttcctgagaataacctaagttattatccatcaggtattccataagatgtatacgctcatcttccgaatccttgcttgcagacaggatataggaagtaccgtaaaataacatcaacaataatagtatgatcgttttactgagcttcaccttattaactaatacgtttatacaatgatatgtgattaattgcgacaaaaataactaaaaaggacgagatatccgaaaatgtctcgtcctttttgtatatttaatcctatttcttgttgattatatcctttggcttcagttttagctgttcatactcattaggaattcgtcgttgtctttggttttttccatacgatcttttacgaaatccatagcttctatcgggttcatatcagccagatatttgcggagtatccacattcgatccaatgtttgcttatcctgcaacagatcatcacgacgagtgctggaagcaacaatgttgactgcagggaaaatacgtttgttggacaggttgcggtcgagttgcaactccatgttacctgtacctttgaattcttcgaagataacttcgtccattttagaaccggtatcaatcaatgcagtagccaggatagtgagtgaaccaccattttcaatattgcgggcggcaccgaagaaacgtttgggcttgtgtagtgcattggcgtccacaccacctgaaagaactttgccggaagccggggataccgtattgtaagcacgtgccagacgagtgatagaatccaggaagataacgacatcatggccacattctacaagtctctttgctttctccagtacgatacctgcaatctttacgtgacgttcggccggttcatcgaaagttgaagcaatcacttcggcatttacggtacgagccatgtcggttacttcttcggggcgttcgtcgataagcaacatgatcatgtaaacttccggatgatttgctgcaattgcattggctatatctttcatcaggatggtcttaccggttttaggctgtgccacgatcaatgcacgctgacctttaccgataggagcaaagagatctactacacgggcagacatggagtcggagtagccacctttgcataatctgaatttttcatcggggaataacggagtaagatgctcaaatggtacacgatcacgtacgaaagccggatcacgtccattgatttttcctacctttaccaatgggaaatatttttctccttctttcggcggacgaattacaccttccacaacgtcacctgttttcagtccgaacaatttaatttgggattgtgatacgtaaatatcatccggtgaagaaagataattgtaatcggaagaacgaaggaatccgtaaccatcctgcataatttccagtacaccggtaccggtcaggatatcatcgaattcgtatactttttcgcgctcaattaccggtctgcgttcttgcacaggagcatagttatcaccagcattttgctgtgcgggacgttgctgctgaacaggacgcgggttgttgttacgattattattgttgttgttataaggagtattattattgtcgcgaggacgaaggcgtgggcgttgtgcggttgcaggcgtgggttctgctacgggtgctacaggagtctcggctttggtagcttcgaatttgcccagcagttctgaagggagctctattttctcagtcgggagatcttcgatgggaatgaagtcatcttcgggttctgataagataggactgtcctctattacgactttcttaactactttaggtgtttcggtttcaaaattcaattcaggttcagcttttttaggctcttccttctttgcaacaggcataggtgcgggtatgggagctttttcttccgtcttggttttgcgcggacgccccggtttacgtttcggggtagcgtcttcggctttttcgggagcggatgcagtggttgcaactgcttcaggagctttctcagctaccggtgcttttgttgcctcagctactggttgtaccttggtagctgcaactgtggcttcagcttttgccttagtgaggtcaccatttttgttggcggtgaagactttatcagtactctctttttttacggttacgcgggtacgtttttgttgtctgtccactttacgctcttctttcagcttttcagcagcaacctttttggtagcacctgcgatggcttgttcatcaagtatcttgtaaacaagttcttctttttttagtgagtctgtctttttaatacccagttcttgggcaatagattgaagttccgacaaatttttgtcgttcaattgaatgatattatacatacagtatatatgtgaatggtttaaaatttcttttgttattggacagatatgttcacacggctgcggttgtcgtcacaagcaacgtggtaaatatacctttatttaatataatgattatgggatatttattattgaaccggaaaactgttagctacccgcacttaggagtttacagaatgtttcaacggtgcaaaggtaataaatatttttggtttcataaacaattcgtcttttttttaattttaaaactttatctttgcttgataaaccaagaaaaagcgcatatatttatggatataaacgaagttcatttcatctatttttcgcctactcgtacttctaaacaagttggcgaggcaattgttcgcggaacaggattaacaaatgttgttactacgaatttaacactgcatgctgctgaggtagatattccggagaatacactgactgttattgctgtgccagtgtatggtggcaaggtagctcctttggctatggagcggttgcagggcattcgtgcatcaggatctccggttgtgctggtagtagtttatggtaaccgcgcgtatgaaaaggctttgatagaattggacgcatttgcttctgctcagggcttcaaagttattgccggggctacttttgtgggagaacattcgtatagtacggaacaaaatctaatagccccagggcgtccggatgcaaatgatttgcaatatgcggaggaatttggtgcgaagatacggacgaaaataaatgccgccgttgatatggaacacttgtatccggtggatgtgaaccgcattcagcgcccgcgccagccttttctgcctttgttcaagtttctgcgccgggtgataaagttgcgtaaaagtggtgttcctttgccgcgtgtaccggaagtgaatgcggaactttgcacgcattgtggcgtttgcgctgtacattgtccttcgggagctattctgaaaggtgacgaatgtaatacgattgccgaaaagtgcataaagtgttgcgcatgcgtcaagggatgttctttcaaggcgcggacgtatgatactccgtttgcttcattgctttcagactgctttgtgcggcagaaagaggaccggattattttatagctttaatcctacatgcaataaactcctttcattcagaatttctacagaattctccgatacatttgtgtctgtatttaaaattaggaactatgaaattattgatagtagaggatgaacgtgaattgtccgacagcattgtgagctttctgtgtcgggaagattatctatgcgaacaagccttttcctttgctgaggctgccatgaaggtagaactctacgaatatgactgtatcttgctggatttaatgcttcccggaggaaatggattggatgtgctgcgaaaaataaaaagtacatcgcctcagacgggagttatcatcgtgtcggcaaaggattctttagacgataaagtggcgggactgaagatcggtgcggacgattatttagccaagccttttcatctgccggaattgagtatgcgtatttttgctttgttgaggaggaaatgttttacgaacagcaacactttacagaatggtccgataagtattgatttgcttggtaaggtggttagtgtcggaactgtcacgcttgatttgaccaaaacagaatatgaacttctgttattccttattgaaaaccgtcgtcgtgttgtttctaagagtgcattggccgaacatcttagcggggacatggcggatatgatgaatgactttaacttcgtctatgcccacatcaaaaacttaaaagcgaaaatggcggatgtgggtatggcagattgcattaagacatattatggaaccggatataaatgggctatagaatcatgaaaagtcttttgcataaaacactctcgcagttccttgtctgtacggtggcaatctttatactgaccactcccttgttttttctgctcaccaagtatttctatgcggaggatatgatagatattatcgaggcggtgcaattggggacgtctattccacacattgacttagaacgggatattgtggtgggaatgatgcttcagttcctgcttatttttctggtcttgagccttgccttgtttattatgatgcgtttcattacacatcgcctgtggttgccgtttgatgatacgttgcagaagacagaacagttcaacttggcgcaaagtgcagtgcctcagtttcagaaaaccgaaataaaagaatttgcccggctcaacaattcattggcaaagctgatgcagaaagataaggagatttatcgtatacagaaagagtttaccgagaatgcttcgcatgaactccaaacacctatttctattattcgcagtaaactggacttgttgatgcaggaagaactggacgagcggtcaatgaatcttgtttccgatctttacgacctcaatacccggatggaacatttgaatcgcaatttactactcttggcaaaaatagagaattcacagtacacagagatggaggaggtcgacttaggcaactttattcgtgaggcaatgcctacttacaatgtactgcacagtgatttgaacatttcattccttgaccagcgtacgtgccatgttgtgcacaatgtgaacacaattctgttaagttgcctgctgaataaccttgttgtcaatgccattcgccatactgctgcaatgaatggagagattagacttttgctttgcaatagctattttacggtcagtaatccggcggatggagtatctcttaatgcccgtacacttttccagcgtttcagttctgatgatacaaaggcgtctgggaatggacttggactttctattgcgaaagctatttgcgactatcatggttggaggttgcagtacgttttcgaagagaatcaccatgtattttcagtgtattttaggtaatttgttggtgaaattatttcaaagcttttcggttatgaattaattcaccacagattacacagattgacacagatcctattttgctgattattagattaataaatctgtgtgaatctgtgtaatctgtggtgagtcttattcattccttttccgatatgagctatataggagtgctgaaaaggatgtaactgtctgtgtgataatgcacttggtgttccactaagatcagtcgtagtggaacacgagttcagtcctagtgggaagtggcttcagtcgtagtgggaagtaccttcagtcctaatgggaactatcctcagtcgtagtaggaaaatagctcgctatacagttgtaaattcctctaatgggaaatgaatgaattccgttaacggctttttgataatcagttgacgtatcctaaaaatcctcctcaaaaagattatcttccccgataaaattcaaaatgtcttctaatttgccttttacttttgcctcagaattttgagataaaagaaagaaaaggtatgaaaagatttgttttaggcatcgtggtcatttgttggattacgattgtattcgctgcaggaaatggcagtaaactgacaggaatcttaagtggtaaaacgaataaagcaccggtggagtttgccacgatagctttgtacgaggcaacaacaaaaaaacttgtgacgggagctatgacagattctaccggatgctttcatctggaagatgtgccaacgggtcgttattatctggtgggtagttatgtcggttatggtgaaacacaatctgaaatgttcatcgtgggtaatggtaatcagacggttgatgtcggtgtattatggattgacgataaaggtcaggtattgaatgaagtggtggtagccgggcgaaaatccacttttgtgcctaaactggatcgtaaggtatttaatgtaggacaggatttgatgagttcggtaggttcggcaagcgaattgatgcagaatattccttcggtagaggtggatttggaaggtacggtcagcctgcgtggtaatgagaatgtgactatccttattaatggaaaaccatccgcactgatgagcggcaggacacggactgatgctctgaatcaacttgccgcaaacagtatcgaacgtatcgaggtaattactaatccttcggcagagtataaacccgatggtgtgagcggtattatcaacatcgtattgaaaaaggagggcaaggcgggactgaatggcactttgacggcgaataccggtagccacgaccgttacaatgccggagtgaatttgaattacggcatcaatggggtgaatttctttggcggttatgctttccggcaagatcgctatgaccgtagtatttttgacaatcgtacatcgcccacggaatacattaaccagacgaccctcggtacaggtcgtcccgtgtcgcacacattacgacttggaatgggagcaaacctttcgactcatgatgtcatggaaatttcgggaagctataatcgccgtcatttcctgcgaagtgagcgtatagaatctgttacggaagatataaatcatcatttggaagatttttattttcgcaatcgcagggctgatgccagggagaatatgtgggaaggaaactttctctatacccacacctatggaaagggcaatgaatggagtgtgaactatacttattcttccgaaagtgaagacgaacagaatgaatattctaccatgcaaatggagaatgacactaaagacaatgagtgggtatgggatgccaattatctgcatatcggaaaagtgcattggcagcatcatttatcggaacggacaaaattctcggcagggtatgaattggaagcgcttcgtgccgaacagaattatcatgtggagaattgggacggagcatctttcattcctgatcttgaccgtacaagtgattttacccatcatcgcacccttcattctttcttcgctactttagaaatgaatccgggagagtggaggcttatggccggactgcgtggagaatatgctgatatccggaacaatttgtattctcttgacagcatcacgaggcagcactataccaatatttatcctacgttgcatgcctcccgcaaactgaatgagcacaatgaacttcaactaagctatagccttcgtgtgaaccgtccggaaggtagtgatatgaatccatttgccgagcgtatcaatccactcagtctttcggcgggtaatcctgatttgaaaccggaaaagatacattcggtggaggcgggatggctgtggcacaatgatacaaatgcatcgttgatgactacagtctattatcgctatcttaccaatcagattaccgaagtgtcacgctatatagacggtggcgtactgctgactactaaagagaatttggatcagagtcacaatgcaggattggagctgatctggagttattctatcaatcattggctctcttttaactggaatgcaaacggatatttcaatcagatcaatgcagaaaagttgggcttttcacgacataggaatactttctcatggagcacgttgttaaatgccaacttcatgccgttcaaacactatatgatgcagttcaatgcacgttatcgttctgccacactggtgcctcaaggccgcagggatgccgattattgtatcaatctgggtatgaagtatgatattccgagtatcaatctttccgtattggcttcggttactgatttgtttgatacctatcggaagtcgtacacgcttgatacacccgaactgaaacagaaggtagaaaaacgccgtaatccccgtattttctatatcggcgtttcttatacatttggtggaaacaagagcaaaaaacacacagcgaagttagaatatgatgagagtatgtaaaatccttatattgcttgtactttgtgcatttgcagtaatcggacaagcacaggaggattctgtcaaaatggatacggttcgggtaatggataataatccacaccgtttccgcatccggcaggtcattttacctgcaactttgattggagtggggattatcgggttggaaagccattggctgcaatatcagaaccgggagttacgcgacgagctacgggaaaacattgacagtaaattcacggttgatgatttttcgcagtatgctccgatgcttgctgtttatggcttgaatttgtgtggtgtaaaagggaaacacgactttgcggatcgtactataatcctcgctactgcctatgcactaatgggtatcaccgtaaacacatttaaaatgacagccagtgtagaacgtcctgacgggagtagccgtaattccttcccgtcggggcatactgcaaccgcttttatgggtgcggagtttttgcgtaaggaatattgggacgtttctccatggataggtgttgccgggtatgcagtagctgccggtacaggcttctttcgtatgtataacaatcgtcattggctgacagatgtgcttaccggagccggaatcggaatactgagtactcaggcggcttattggctttatccaactattacaaagactttcttccgtaagcggtataagaatatatttatttctccttatttctcaaaagaagaaaaaggagtaagttgtcatatcgctttctaaaggatactcgttgcaattaataaggaataaacttcagaataataactttctgtgtttggtcgtctattctgaaacgattatcagtacgttcgcctatcaaccaaatgatatgggagccactgcaaagcacccattgttgctctttgcgggaaagggagaattttcgatcagtaaggtagtcactgaccttttttcgcccagtcataccaaagggaacgaatgtgtcgccttgtcggtagtgtctgactgtgagaggttgttttagtttgtctgcatcgaagcaagcagtgtttcggtcacggggaatgatgaaatcatctgtgacttctaattcttccattgtcaaacggaagggtagggcagggtcatctggagaaaagactgttgaaacatcttctgaacagatcggttctaacagtagaagctctcgatctttaatcacgcgccattctccactgaggaatattttccccggttgcccattcagagaggtgaaaatatctttgatctgtgcactgttaaatcctaatggagataagatctcaaataataaggtttccggtgcagattcttggagcaaaacactgatcaggataccttgttcggtttgcactttctgcttgccttcttctattccttttttatataagagagctgcatcattcagatgttctgcagtgcggagaaggctttcttttacagagggattgatttcctgcataagtggcaagaggttgaggcgtatcttgttgcgtgtatattcgtcttgcaggttagtgctgtccgttacgtaagattgcccgatttcttgtaggtattcagttatttctttccggtcgaggcataacaaaggacggacaatatttccgtttttggggcggatacccaatagtccgttgatgcctgttccacgaataaggttgagcaggagagtttctacactatcatctttatgatgggccacggcgataacgtcggctccttgttgtagacggagctgctcaaaccaggcataacgtaattcccgcgctgccatttcaatggatatgtggcgcttttccgcttcttccgtagtttggaaatgttggacatgtaacggaacttccagttgcaagcatagttcgcggacaaacatttcatctcgaactgactcatctccccgcagatggaaattgcaatgtgccgcctcgcaggtgtaccccatatcaagaagtagacgcaacaaagctactgagtccgctccgccactcagtgttaccagtattttgtcttctcgtgtgaaaagcttttcctggtcaatgtattgcgctattttctttttattcataatggtgcaaagataatattaacgaattgaattctttctaattcttcaaaacaaagtggagaatggagaatatttctccttatttaaaaacaatctaaataatttgtaggctaaatacaaatcatttatctttgcatccaaattaaagaaagagagaagactatgcgtttatccgaattaaaaactggagaaaaaggtgtaatcgttaaagtactggggcatggcggtttccgcaaacgaattgtagaaatgggttttattaaaggcaagactgtagaggttttgctgaatgccccgctgaaagacccaataaaatacaaagtaatggggtatgaaatctctttgcgccgacaggaggcagggatgattgaaatactcagcgaacatgaggcgaaagagcaagtgacaaaaccgaattatcatccgggaatgagtgaagatatttatccgggtgaagaagaactgaaacgtatcgctctcggtaaacgtcgtaccattaatgttgcattagtgggtaatccaaactgtgggaaaacttctctgtttaatattgcttccggttcacacgaacacgttggtaactacagcggggttacagtggatgccaaggaaggctactttaattttcaaggttatcatttccgcatagtcgatttgcccggtacatattcgctatcagcatatagtcctgaagaaatgtatgtccgtcatcatattattgatgaaacaccggacattgttatcaatgtggtagattcgtccaatctggaacgtaatctgtacctcactacccagttgattgacatgaacgtgcgtatggtgatggctctcaatatgtacgatgaactggaagccagcggcaacacgctggattacatgaaactgagtgaactctttggtgttcctatggttcctaccgtttcgcgtacgggcaaaggcatcgaagatctttttcacgttgttatcagtatttacgaaggtgccgacttcctcgatcagaaaggcaaggtacgtgcagaagtgttgaatgacctgcgtgaatggcatcgggagtatgtacccggctataccggtggggctcataaagaagaagaagtacgccatcatggattctatcgtcatattcacattaaccacggtcctgaactggaacgcagcattgaagaggtgaagcgggtgattagtgagaatgagggtatccgtcataagtattccacccgctttcttgccatcaagcttctggagaatgatacggatttggaaacgctgattaaaactttacccaacggcaaagaaatcatagatgtccgtgatcaagaaagccgccgtatccgagacgtgctgaatgaggattgcgatcaggctatcactgatgcaaaatatggttttatatccggtgcactgaaagaaacctttgtggataatcacttggataaagagcatactacacgcgtgatagattccattgtaacacatcgtgtgtggggattccccattttcttcctgttcatgtatctcatgttcgaagggacgttcgtgcttggcgaatacccgatgatgggtatcgaatggctggtagaaaccctcggcaactttatacatgccaatatggctgacggaccgttgaaagatctattggtagatggtattgtaggtggtgttggtggtgtgattgtctttctgccaaacattcttattctttatttttgtatatcgttgatggaagactccggttatatggcgcgtgctgcatttatcatggataagattatgcataagatggggttgcatggtaaatccttcattcctctgattatgggtttcggatgtaatgtacctgctattatggcttcgcgcactattgagaaccgtaaaagccgacttattaccatgctcgtcaatccgttgatgtcatgtagtgcccgcctgcctatttatttgttgctggtaggtgcattttttccgaacaatggtagtttgatactgttattaatatattcaataggtatcttgttggcggtattgctggcgcgtttattcagccgtttccttgtgaagggggatgatactccgttcgtaatggagcttccgccttatcgtttaccgacagcaaaagccattttccgtcacacgtgggagaagggtgcacaatatcttcgtaaaatgggaggtattataatgatagcttccatcgcaatatgggcattgggatattatcctgaccatgatgcgtatgaaacggttgccgaacagcaggagaattcctacatcgggcagataggaaaggctatggagccggtgattgaacctttgggttttgactggaaacttggtatcggtatactttcaggtgtgggcgctaaggaattagtggtaagtacactgggcgtgctttatacaaatgatgctgaagcagatgccgtaagtcttgccgaacgtattccgattacaccgttggtagctttctgctatatggtgtttgttttgatctatttcccatgtatagctacgattgtagcaatcaagcaagaatccggtagctggaaatgggcattatttacggcagtgtataccacgctgcttgcgtgggtaatggcatttgccatttatagaataggaggattatttgtatgatgaattggcaacaatgggtagttgcaatcctgttactgttgtgtattgtccggatcggatggggaatttatgcttttttccgccggacaaaagaaaatggtaatccatgtgcaaattgcgtaaccggttgtgacttaaagcgattgatggatgagaagcgtgcagagtgtagtgcgacgaaaaaagaaaagaagaaaaattgctgcggatagttggaattttcaaaaaatgtactacctttgcaaccgcaaatgagaagagactggttccttggatgagtggcttagtcagcggtctgcaaaaccgtgtacggcggttcgaatccgccaggaacctcaaaacgaacaaaatgccctgagtagaaatactcggggcatttgttgtttattgaccttcagtaacttagttaccttgccatttgggtgaaaaatcgtgcgagtgtagaccgattgtagtccgagcctcctaaaacgatacgattgtagcacatgaaaaatattaagatatacctccgaaaatataacaacgatacttccggtatcgtgtggatctccttttatgtacaacgacaaaagattaatttctccactaaggttacagtagagttgaagcattggaatgagaaaaagagtatagttgctgcaggagataagcaatctgccgataagaacctaataatcgaaactatcttggcacgtatcaataatgtgtttgtaaagtatcgcctccgggataagaatctgtctcgtgacctctttctgcgtgaatataaccgaccatcggattacgctacattcttcgatttcgtccgggattatatgaaaaagatctctcatcgcacggaacttactacccttaacacgcacatgagtgttatccggaagttgaaagagttcaatactgacctgatctttgatgatatcacacgggattggttggatatctactttgcttacctccggagagaactggataataatgtaaacacagcctacaagaacatggctattatcaagaagtacgtattagctgcatacaaagctggatatatgacagagaatccttttgaagaatggtcaattaaaaaaataacctccacctgtgtgtatctgaatgaagaagaactggccaaactcgtggcattatataatgccggggatttggaatataaattgcataagacattggagttctttctattcatgtgcttcagcagtctacatgttggagatgcaaagaaactgcggcttgagcaattctctgaagatcactttacctatttccgaatgaagctccggaacagcaagccggaaccgatccagatcccgatatctgatccactcaagaacttattatccaagattgtcggtaccagaaaaaaaggtcctttgtttgaagtgatccaagctgatcaaaccatgaaccgcaacctgaaggatatcgctgccattgctgagatagataaacctatcactcacaaagtcgggaggcatacatttgcaaccatttacctacggcatacaaaggatcttgcagcactgaaagagttactgggacattcagacatgaaagaaacgctcgtatatgctcatgttatggatgagtcgaaacgtgaaggggtacaatgtttcaatagctttgtaatttagtactttcgtacgaagttaggttaaaactctgttttttaaaggaatgcggatgcacgatctttgtacgaaaccgcacaaagatcagtacatccgcacgaatttagttaaggtcggataataaccgggcgcatgaagtttacaaattcatcccttacttcaaagcagggacacattttgatccattctgatggctcgacgataccattatcattgagatccggagatgtgtcgcggtggcctaagatctcgatgatattgtattgctcacagagagttgcaacgaggttacgaagagcttctttttgtgcaggcgtacgtgtatcggcagcctttcccattgcgtttaatcctccaatatagcagataccaacagagtgatcattgtaaccaggacagtgcgctccattaattgaaagtgatcttcctgtttctaccacaccgtcaagaggtataacatagttgtatcctatacctttccagccttgcgctttatgcatccgatcaatgtcattggcgcggaaatcttttcctgcaggagtagcagaacagtgaatgataatagaatcaattgctttcattattctttatttaagttttttgcaaaggtatattaacaatcatgtgctataaaggacattgatttgatcaagtcgtagccagtaattcttgcattcttgctaaatgatcatccaatgttttgtgattgcattttaatttccgacagatggcagctttagaatagccataatcgagcatagtcctgataatgccttctttgccagtcagcttataatgagtattcttatcgcctttcttacgtccgagttgcatgccttctgcttttctacgtgcaagtgcctccttagtacgttgagatatcaactcgcgctcaatctcagctgacaagccgaaggcaaatgctaaaaccttactattgatattattgcctaattcgtagttctccttgactgtaaagacacaagtctctttcatcatacagagatggagcatactcattatacccatcaagtttcttcctaatcggctgatttcagaaagtatgagagtatcccctttcttcatgcgttttaacaaaggcccaagctttcgttctttctcagatttggttcctgtaacttgttctgatacccacttatcaattactaatctgcgttcgttggcaaaattctgcaattcaaatctctgattttctactgtctgtttgtcggtagaaactctgatatacgcgtaaatcatttttgccggtgaaggtaataaactaatcctgccgagacaaatcgcataaagaacgccgttaaaagtgtaaaggtatggcaatagaaaagattaaggtaacggataccagtgtgatagagcagataagaaatagcctgcctactgcaaatattaataagaatggattgatggattttaaagacaaaaaaagaggcttttgttgggagtcacaagcgggagaagggaaaactctttttgtgggtaaattcccaagaaccaagagcatttcattttctgctattagtggtaataatagtagttttgtgacatcagatcctactccactgatcatagcaataaataattatgatgggataattaggtctgcaaaaataggaagtgggaacaaatgggcttacaaagatgatgggaaagacattaacttatactatcaatgctctccttatgtgggagatggtgtattcatcatttcttatagccacgttgagctgattatggagtttattaatacaccttctgatttggttttcatttgacaagtaaggagatattttttactttaaatagcgtattatctcagaatccagttttctatcatatcttttgcccgttaaaagtagcaagatatgattaagaaaataacaactaaggattataataatgatctggagacaaaagatagcctacataaagtgaaagcaattgatgttgtcggtaatgatatacttgtgtcacctggtgttgtggccaatattggaggatgtggaacataccgatcaagtagtaacattctttatggtaaatggtatagaattgctgttggaaatgtaggtaatgcttccaatgcagtacttttgatggtagggaactattttaataatgaagccccacattctcaattgtattatatctctgctgatggatatagtggcatgccgtctattgtgcaattagcaaattccggtagagtaataagtaaagctcgaatattatataaaccatcaacaacagaaggaccaatcattgaaatatttattatcgcttcacactcaaataaatttgtattttcttattcatgtaatatgaattttactttccaagatccaatagaagttagtgagacgccggagtctggttatactgtaaaggaatttgtattctaaaaacgggcggctgtggtcgcccgcttttattgtgattcttttgcccgttaaaagtgtaaaggaatggcaatagagaaagttaagattacagatacgaacgtgatagaacagatccggaatagtttacctactgcaacaaacgaaaaaaaaggtttgctatcatctgacaataaagtaaagggtggcttattgttgtttccagcttctatcatggatatacatccagacgactattatttatacacgcgagaaggaataatgatgggaataacatcgggggttactcctaattgggtattcggtggtggttgtgttgttcattgtcagagggatacaataggctctgtgacgacaagccaaataatttttcagttatttttcggaagcagtcgcgtcaaatttcgctatggagctgggaattattcaaaaattatttgggagtcatggaaagatttgtaatataattgcacaagaaattcaaaccgcaataaacaactaatattctaacatatcttttgcccgttaaaagtagcaaggtatgatagaaaagattaagataacggataccagtgtgatagagcagattagggataatatgcctactgcaactatcagtaagaacggattaatgccagctggaatgatcggtactaagaatgttatgtcaagcgtattgttatgtgagactacaaatactgccgttacaggctctttattattagcagtttctgcgaccacttcaggaatccccaacctttatttcattacaatggggcgtgctgccggtagtacaaataatccgactcttagagtaacgttattatccggtatctataatattaaaattatcgggaaaacagatgcaaatggtgtgtgtaggatatacgctgaacgcaatcagtatacacctgttcttgatgttattgcaatgaatactaatggcattactatgaaaatggaaactgctgataattcagattttgcaaatggctttgaagctacattaatataaaattataggggcatttgcccctataattatcaccaatttggttgaatagcatcttctgccggttcttcaaataccataggaaataaagcattaccatgtaagaggttaatgcatgatgccgtagaactaactgccgagctcacagcccatacaattatagtattgttatctatcttatatactaatttgggctgattcgtttctcctgcttttccgataagttgcttaaaattacatatatgaactgtagtgtcataatttgttatatatcccagaattatgcttgaatcttgactagaataacgtatcatattcattatgaaactgcagttcatgttcacatttacctccattattctaatccatgagtatccgttacccatcggaaagaacacccgttttatcattccagcattttccaatgttgatactaaatttgctggtgtcgatacaatagggttattgttagcatctacagcctgtattttggaaggcatcccattctctaaactggcttgatattctttatcactaattttttcgaccatatcttgctacttttaacgggcgttttttctacgatgaaaatcagcccaatttaacatttaatttatattctctttttgtttaataactctactgtcaaccattgacgacaaaccaacgtttatcgctttcatctggtcctattttcacaaccttcagttgtaattccatcgtctcagacatagatatctctgtgacattgttcggcaaaaactccccatcgggatatattttaatcactggccttggtgctaaccttccagcggcaacgaaatagaacaaattaacttctgttccggcttctacttgggtagccaaaggcatacatagcgtatgattgtttacagaagagcctttgcaataaatataagcatttgttcgtcctgaaagagagcaaaccgtggtttcattcggttctaagtcaatccggatatatggagtaataatacttccattaacatctacgctattgcactttattttgccacgcaaaaagtcaaggagtaagttaggagcaaattcattcctactaaacccttcatagtttgacgtttcattaccatttgtatcttttccctgctgtgagaacataaattcttcatagaaaacagcacttgccaatttcgcaaactgggccatgagtatttctatgtagatagctttaaaattctcaaaaggtatccaagtggctttttggccgttcactgcatagtctttttgaggagtattaaggtttgatggcattccctgtccgacccagcttgtgacttgattcatgacgtaatacatcccattgtacaaaacataaggtgcaatcagatccgtacaaagataagtcatggtcatgctatactcgcctgccggaaatggtagttggcctcttttgccaggctcactttttttggcaaacttaaccgttcttgttacacttgctattcccatatataccactttaagaaacagtctcgatatatactgccacatctgtaccagcctgctcacacatcgcataagttacagtataattagcctgattagaaacacttcctaaaattatacctacactatcaatagcggtaaaattgaacttcatatccatcgcttttgtagtagtaccacgcttcacgacaattggagcatagacaacggtgtctccctcttcttctatcgtttcatcagccggtgtaggcataggaatgatttcataaggatcggaagcgtccataactccttgtatgtccgtaccgatttccgtcccattctgagaaaccacacacttgaagtttgagtaacaatcaaccatatcacccgtaacagtcaatgtctgcgtagtctttccggagagtaaggaccaggcaccgctaactaacttataccatttgtaggtcaaattagaagtaacggcaatgccagcctgatatgtcatagctttcagaacacaactgcctcctttttccgtaatggtgaaatacttagcatcccccgcagcaatagtaacgaagtaaggtgatccggttgcccggcggatgggaatattatataccccctgtaccttatcggtcgtagtgccatatacaacagtagcctcggcttttatggtgcaaggtgcagctccggcggcaacaacaaggtttttcaagatctttatgccccaatagtcttgtgtgccggcagcatacggaagtttacgaaaatgacctgtctcaccgttgaatacattggttgaaatgttattcgtaaaagtgagctttacaccattgaaataccagtcaacggcagtcggtacggtcacaccttcagcaacacggctcgatgtcacgacaaacaccaactgcggctgagtttgtgagaagtccggcacgatggcaccaatagctccaatcgaaccctcaaactcctggtacaaatccccggaaggcgaattaataattgtggtgtaagttccagcctttggcgagaactttacacctacttgtttggtagcaacactcataataattctccctcgttattagtttccgaaccggtagattcatcttcagtatctcctggggcgtcttcccctttaggttgataccattcaggtgtcgttaccaaaataggatgattagtaccatctatttcgtcctttgccacattgggagtcaaaacaactccaccacaataagcggcacgggtaaagatatcctcaccgggaaagcgaagaatatcagcctgccacaatagataatttccatccgcagttttattgcggatagcggttaatcccatttcacgggcaaccaactctgtcactttgatataattagccatagtttttaattgattattacttcgttattatagctttaccgtcattggtggttataatcttctcatcagtgacagcaagcatcttatagtttcctttatccacgacttcgacaccaagcaatccgctcgtaacatcaactgctgagagctttggggattctccggtaccgatgaccgtgttatctttgtaccaggttgcacgcaactcctgcatggcgtttgaaataatgcctttcggtccaaccacaataactttgggttgtactacagttgtgccgggagctatgcgattaggtatattgataatatcataatcgaacggtggcaaacgccttacaaccgtagtcgtcgcagttgaatcggcatctgtaggagacgctgccggagaaccggtaggagaaaatgtagctttacagacatacgtttgtttttcgcccatcatatccctgtcaacaacaagtacattgtcattggcactgataatatccatgtcaagttcatcagatccggcaagagtcaatgttccattttcacgcagcttataccagaagaattttcttttagcggtatcaccggtatagtctgtttcaccgaccatcagtttggcagttataatctgctgggcagcatcttcccacgggttccagaggtgagtagattcactatcaagtgtcaacaatggatttgcatctgtggcattgatacatttaaccagcttcgttcttttgaaaacaattatctgattagtacgcgtatcgagatactcagcttcaaaatccaacgttataggatgtaggagagcagcattctttttaaccttaatctggcctttgttcgtgccatcctgggttatttcatagctattattggtactctcgatcagagtcttttttccattgatgatttcattccatttgagatttatcaatttggcattgatattatgctctttgataattccatcccggtcgatgacatcacactgcggtaacaagactaacggggttagagtgtagtcagcttcataaactcccgtagctgcatcatacgtctgtaatgaagcgattgagccgacctcgtttattgctacatgtacatgcagcggtttatagtttatttctattctcttacgtttcataaagcaacctccattttatcagaatgtattttttgaccatcacgtaacaatactgtagctttaaaattgcaatatcctatttgagtaaaattactcccaagatcatcgcgatgtattaccaactctttaccggtatcagcgtgtttcactgcccaagcattatcttctgtcacattttcactattgcgagtccattcaatatcaatatccaaaatatgctctgtcacatcccggttataaatctgaccgctaatttcgagtgtagtcaattcgtctataaggttgccatctttatcaagttgatcaaagtttaggaaccatccatttgttgactcaatatctatgctaaaattcggattaccttcgatcatagcccaaccagtagaaccgtagcgtggctcatccaaggtagcatttataagacattgccaacgacagccgtaatgccacacggtatccgctgaagtggaagacacagaatagggtttatcagaagctgcgacctcagcactccagtttccacgatccacaagcgaaacgacaggaataccttgtttatctacgcgcaacaaatcctgtataacagctccacggcagtgtatatagctatggcgatagctgataggcaggttatcaaacaatgacagttgtttgagtttaccggcaataatggcgtagttatattcctccaaaattggttttgtaacaccatccaacatacagatacatttctcacgggatgatagataccagtacgattgacggtcttcattcacggggttgccacgatgagataatatcattagcggttctggaggataattcttgccaccgggtacttcattatccggatacataacagcattgatagtgttagctgatgtatcgacatgtaggacacgcaaccatgaagtataatagttaccactaccggaagcaagctcattcactacaccataaatgacgtcattttcatccaatgccgtaaaatcattctcccaacgtttacgaagcggaagtagataagtaccatcatccaacaactttacactttcaatagtccctgactcggaaaatgaataatcactctccatagctgaaagacggttgaaaataatctcttgaacaataataccgaaacgagcttccaggatatcagcctgaacacgaccgtttttaagcagaatacctttgcctgcagttaaagagtcgattgtctcaccaacttcggcacctcccaatagtttcaggagataagatgttccatccggttctgtcttagataagaagtactttttcagttcttcaagatctatactcttatccttcagagcttcattcaaaaatgcgagtacagcagctacatgacggttagagacactgtttttcagtatcgctttgtcgatatagtctataagctggtctataacttcctgttgttgctgcgtgctcatatcagttgaattctttggtgaactgttcggtgtgtatgcgtggtgatccgaaatcatcatccagcaaagaaccggtgtgatggtgttctgattcagcaaagcgcaatgttaacttgatgctttccggaactgtagcacgcgctgcagatgtcagattgtctgcggtggcaataaccttgatattgcggccatccaatcccaggatcttgatatcatccgaagacagcatatcaatgaggtgcccgagttcttccggagagcgatatccggattctactttcaaagtatcggttccggactggcgttcgcgggcttcgacataatcatctaccagttcgtcatagacaaagtatgtttcttcatctgctgccttgtgctcgatggagccgatgccggtgacctcgatacgttcgtacgctccgtatgagtttaaaaactcaagcaagtagcgttcacgtgtgactgttccgggagtgatcataatagtacatgctttcgtttctccggagtagacatcaaaaacagatgccaggacatgattagtctcaaaaagattcttccggaggcgatataggttaagagcgacaggatctccggttgtgccgggtaggggagtggcaatcccggcagctacaactttcagttctgcatcagggtagatgaaggggattggcaacagttccgtttcccggatcgtaaagatacgcccgtttccgcgggtggtctgaaagaagtttcctgtagagttaagtaacttccaggtaaatatattgctgttttcatcattcagccggcggagtgtccttttgctgactccaccgatcagggctttcaaggttaaagtgacttctccactttccgtattagtgaccgtgatggtgatatccttagctctgccggttgcactgagcagcacatctacggattcattatataaagtagtcggttgcacgatggcggcaagtatatcctgaataaagacagaaaaatcaccctcaccgctaccggtgtaaacggtattatctctttccttgattacataagtagccaaagaagtggtattgactgacagcctgatcgggttcccggtcaatgccatggttgcaggatatatattagcggtcagactcatagcggagtataagttaataaaagaatattctcagatacggatatcgtacacgcacaacaaattgccagaaacacatcacgttccggagtgggtgccgtgaggaatacaaacagatcgtcagccatggcaacgttgttgccggagaactggcgataagcagagagtaacatatctgtgttacttgcttgcgtggctgttatgtttttgttgctaatcatactgcaaagatggatttagatcgcggatacttaaaggacaactcaaatgccggttgcctggatccagagattatatttgaactcgaaatgcactcccccgtattctttctcttcatagatcggaataccggtactggtatagttcttgataactctgatcttatagtagagatcaaagctgtagtttacctgtttgatgaaatgggttcgcttgttatcgaaatcatctttggtcggtacggtgaaaggtatctcagcatcggaggtttcgtcactgacttcattcttccggttgacaccgatccaggttgcaggtggtttgactgcagtctgccattgtcggatctgctcgccgcatacggaattgtagactgattcccggttattaaagaggacccatttataaagctgtggtatcgtatgaatgccttgttccttatcaagatcataaggcttgagtagtttaatagtccgtaaatttacggtagccggcaaactgaaatgcagcggtagctgatacctctgtgtatcgactaaaagccgttggccatcaagagcgacaggggtactaaaatcagcattcaagagctgcttgtgttccaggtgtaatttggcttcaatggtgtggttagcatgcctcagaatcgcatcatagtctttccagaagcggttgaataatccgttttccccgacgaatgtcatcgagatatcataggtgtgcccgttcttgtcaacaacctgcccgttggatccataacaccggggactaccacaggggcgtgttgttggcagggagaagcaaaaacagagcggagacgtgttttctgacttttccgagagattgacatcagagcttgagatattagtgtaccggtgaatcttaccgaacaaatatgcaggacacgcataattatcatccggagcactggctttgatcggcaggcattcatctactgacgatatatcttcatagtcgatgttagcttctttatcccaaggaaagaagtcagaggatacaacaccgagttttcgtgtccggagattacgtacgcaataggtcccgttactctgggcgtagctcagatatccgtcattatcctgttcaccgacaatgtacccgtatggcttgagaaacttgtccagggagtcggctgcaggagaagcgactaacagcggatacgggccactgatcgaagttgctgcagacaatttcaattgtttgggggtgttgtaattcgttataggttcggcggctttcagtttagaccagtcttgtgaagccggagaagtgataatatccttaataaacctgagtcgtacagtctttgtttttccatcgacaaagtagaccattccaaagcggcagtaaagtgcctgcaggagttcgtttattgtgcaatccggcatgaggtccgaatagtcgataaaacctttgacacaacagtctgcagcattgttgagcaccaccaggcgggagagttgcggatgtgtggagaaagggttctccgtgacatgatatccaaaagagttgaagatataatcaagcagccaggacactttcagaaaaggagtgatcccgtaaccaatgggcactgaagtggcgacaacttcactgttcagcagataggtttctgtccgggcggcaccgtttaaattgtatttttcaccttctttgatgatggagtttaggtattccggataatacacgtccgcatcattttctttggtttccggtatggctacgcagatctggaagacatggaagggagtatctgtcttccggtcattcataatatcatcgaggtaggtgataacgtcttcaactccattttccgggctgtatttcggcagcccttcaaaagaccgcagggttacggagttccagatattatagatctcggactcgtcaaagccgatattagagacaatgccggtactgtgtgaggcttgcgtgatattcatttttccgacccggtgatagatgccatcggatacggtgatccgcgcatcttcaaccggtgcctgatccgtatccgtccggtttatgtatttaaccaggcgcaggttgtttttagatgacggtatcgtggcagaggtggattgcgatccctggtcattaaagacaggtgatgtatcttcgatttcaatattgaaatcagaaggcaggtcaaaagttccagattgagtagtgatctttactgacatggctatttattttgtttggtaaatgcttgctttgattttcggtccagttcttcagcgtctcgcagatcccggagtacaacgtaggctttcagatgtttcaaagtggcaataagcgagcgcagttctgcgatcagttggttgatcttaccttcatcttgagaggttgtttccggggtaggtgaggggggagcattgaaggatcctgtctccaccggtgtgtagtttccggcagctcgttgcggtacccgaccgctccgggcatcttggatcgcattgatcaccagcggataattaacatgcttctgcagacgggcgagatcttccgcattgatgataagttcgtctccacgctctgatatcagagccgtttggcgtacaataccggtaggagtagggccgatgtaaggtacatcccgataagtctttccgtcttcttcgccgataacgtcatagttaccggatgcccactgtcgaacggtcacgttggcggttggagccttgttctcggtatcagtggcagaactggagcttttctttccaccgatcagggctttcaagccggcacgagctgcggcaattgttccaccgataacagcagccagggccgcaccggttgcgatgcctaagaaacctttgctacctatttcacgggcttgagcttctgcaatggtggtgataccgataccggttaatcgtatcagttctgcgtcgatcatggtggttagtacatcaaagacgatatcgaccatagagtcaccgaagtttgccaaggcgttttcctgtccggcaataacgttgcctattgcttctccgaaactgttggcatacttcatcatggcggtgtgctgttgtttaccgctattcagttgtttttttgcaagatctgcagcgatcttggcttctctgtcggctgcctttttccgttcgctaagctcttcctggatacacttcattttgaagtctaaaagctgctcttcgatgctcttcctggcatcggcatccagcccggcaatctcaagagaacgttgcaggtgcatgatggcaagttgctctttagcgtcttcgtaatccttttctgtattcagattctcatcactttgggagatgaagagttctttcagatcacgttgctgtttctgataaagtgtctgttcctcttcgatggccaactcaacagctttctttcgctcctggatttgtatgtctccgagttgtttttcagcgtcggcagcttccgaagttcccttgccggcgatattaataactcgtttgaaatgttctttctttagattcagcattctggtttcgtactgcttttcggttttcagttcttcgctgtgtccttccgcatatattttcttgatatctgcctgttgcttatcatagagtatcttttctttttccagggcggctttgcgggctttttctgctttcttttcgtccggatctgttttcgcttttggcgttgttggggttattatgacttctggtaagacattagcagaatcttgtttctttttctggggggtaccgataaacgggttcatctctttctttgtattgttaacccgtttgaccattttttctattttttctacataatcctctatttcattttcaaggtcggttactggcaaatagcgacctttaaagttcttggttcttaaaacctccataatagaggcagtagtttcttttactgaatgaccgctttctatatatttatcgactgtagtagtgagtccctgtaataatggattaagttgagactctggtaattcctttgccagtatttcacgtatatcattcatctgctttatccgaccttcgagagtatcgctatgtataaaatcgatcttttcctgaagggctttttgagcgaagttttgactcatggctttattgatatcccggtatgcctgttcgatatctttcagagtactgcattcgttcaacagattagggagatactgcccgtatttagtgttgatttcctcgatgagttctttgcggcgttgggtcttatcggctgccgacttggtagcatcaatcaatactctcaggtgccggcgctcttcctcactttgttccaaaaaggatttaacggcttcttttgcatcattggtccgggtggcaaattggtagatagccatacccgcaccaacaaccaaagaggctattaatccgaataggttacctttcatggcagtattcaatgctttaaaagcagcgacggccatttttatgttaccggttagagcatattttgctattgataaagccagtgttccggccaaaagagctttttggcggataatcgtcaactgatccgttgccagacttgccagtttcgcttcccgaagtttgttttcatagaatgcagctaacttattggctgtataataagtgatgattagggtggttaaaacggagatagttcccatgttccgggtgatgaaatctaccaacctgataaacttacctccccagctcacaacaccgttaatagattgcacgatggccgggttcaacttctccatcagggcaatacccatttcactcatcttgttttttgcctggtcaagtttggcggctgccgtggctgacttggtagctgcctgatcgacggcgacagtggtaccggtgacagcttcggtatagtactttaccttttccgcctcgttgatcagcacactggcaacgttataaccttcctctccgaactgtttttttatctgagctgcagagagctgtttttgctgcaagttgttgagggcggtttctaatcctacaattttaggattcgtttcgtcagctccggtttgcagggtgagaaagaactttttcagcccggtaccggcaatctcatcttttatacccttttcggccaatgtctcaatggtaccgactaattgttctatgggaatattggcagaagaagcagcaactccggactttgtgacagcagtcgttaccgattcaactcctgcagcaccgaatttagaacctgcagccataacattggcatacctcgccgcatgatctgcaccgtcaccgtattggtttagtgataaggttacagcatcgacagcgtcttttaaagtcattccggaagcagaagccagaataagggtttgtttggtcacttcggccagagcttctttattatccaacaactccggcttggcggatcctactaacttgtaagcgtccaagatctcagttgctgactggcggatccggataccgctttcgtccatggttgtggataatcttttcgcttcctgttccagccagttgacactatcatcatccaatccggtcaaagcctttacatcggccttggcttcttcacgttggttacgcttctcccggagctggtttagcttgagtgttacaccggtgatagcggcaatgccggctgttacaatggcggcgtatttattaaaaataccgatagccttgccgaaggctgtaccttggcaaccgacttctacacgcatagcttgttgggcacgtgtcacggcttcggttacacgacggttttgttccagggcggcagtgtattgcgtggttcccggtgtggcttcgcgcaagttcctacgtacctgtgcttgtacggcaatcagtttcgtgtacgaagatccggacaggttgttgagcaccgcctcggtttcctgtactttggctttgtagttctgcagggttcggttcttagcttccagctctttctttagcttcttacttttactctcgtagttagcttcgcttttattgagattggcaagcttttcttccagcttttggatagctgcttcaacagttgcagccccttgcgctgcaggggtaccgtcgatataaattttaatgctgcggtttaggtcattatttgccataaggtcaggttatttatctatgaatattctggtagcgtcgatcagcatggtgtcgaaataccttgttacaatgtcggcgagttccgggagacggtttcgcacaacgggatcaaaccattcaaatgcgttgcggttaccggtgccctggctggcattcagagaattggggtttgtatgctttacgattccggtacttacttcaattccgttgatgttttttagcttggtccagttggaaccgattgttccaccctggcttcgcccggctcctttatggatgtagatgccatggcgtggaaatgaaaagccaagttggttaatgatgccatatttatcggtgtaggctttagggtgtagttcccgggctatgcgcatacttcgggaggcaatggtagcgcgaagttgtgcggctacggagttttgccaggcgttaatagcattattgtattctaccacacggtcggcgtcttgagccatggagaaacgttcggtttcggagatggtttcaaggcgaataaggctcgatcctccggccccggagaggctgttttgcttgcgcttggctgcattgtatcttcgtgctgcactacgggcgtctcgggtgtttttgtagtatcccatagctatgcattccagatggttacgtcaataaaaaagtcttcagcttcatgtatggtgaaagtgagcatacagccgtaaaagttgtcacctatcggaccgataccgttgatttgtgtattacgatcaatggcataagagagctgcggatcttggaataatacgttcctgatttgtttgcatacagggcggcattcttcaaaagcggaagtgatggtttgaggtcggtcagagatcgtgttcctggcaacgatgaaactatattgcagagcatcgtttaagctgtcgcctccattatcccgggagtcagattcatagccattgacagcaatcaggatcataccggttacactggatagcttatcatccaggttatacaggtcttccagtccaaaggcttcaaagaaacggggcttttcgggtgtgtgactgatagacttcagtctgatggcgagctgttcgccgtatgaaaagtgattgtagatgtccataacaacacaagggtttaggttatggatacaaaaatagcccgcatggggcgggctataaaggacagatatttaagtgatgattattcgggcgttaccataataaggaagagaaaaacgactactacgcaccaaattaccttccaaaaaaacgacttggttgtcttgatcacaccgataccgatggtgacgattccggatatagctaatatcgttaacatcatttttcttcctccttttcttcttcaggtagcaagatacgaattaattcggataatcttgccgcagcgagttgtttttcatccataggggtggtaggatccagcagggatctaacgagttgtagggcttctttgcgtttcattgggcacctccttccgggataaaggttgataacatgtcttgcatacacaataattcttgtgcaagtttaagacgttcttcggcattgccgtagcattcgccgttaacgacacagtaaagagctttacggatggtagtgtcccacatttcagcaccgccggtttgcagggtatctacgcattcaatgatttcgggggttaaagcgattttcttagtcatgatttaccccctttctttgctttgtagacacaataggcggctactaagagacaaggaggaaatacaaagccaatgcaggcagagaagattgccgccatataatagcggtcggagtcggttttcacttcgcagtcagtcatactgcggaaataacgctcttggagcgtgtttacgttctgcgtggagcggaacgagggcacgaaagattcggtgccggaagtttgatttttcatttttcacgtgtttagcgattgtagtacagagacggctgcacattccccgtcgctaaacacgtgaaatcactccgaggagcaaaaacacaaggaaggcagccgctatatttttcatacactttaattggtatgaaataaaaatggcataaaaaaggcccgcaaatttattgtgagcaaaatccgttgctctcggtttgtgataaatatcacgtgtttagcactgcaaagatggggattctaaacgaaataatcaaatatgatcatataaaaatatgatcatattaaaaagtaggcataaaaaagcggagttgttatactccgctttgacttgtaagcctcaaaatgacaaaggtagagcatgaactacttccttcatatcacggctttgcaccaatcattaaatgcattaagaatccattctgttaaagcaagataggaattggtaggcccctctaatgattgattagcgtgcatttcaagtgttaatgacggtatggttaaaacatcttctttttcgtatattgcattattgtgaactgttgaatttcgtatgaatataattttttcccagatgtcgtaatcggcttgagatattaaccctaaatcgagggactgtttcattatctcttttaaatatattcttcctctaaaattaaaacgggcatcctgttttgcatactcttttgcattatattctatactggacatacaactaataaagagtgatttggtaacttcgatgattttttccgtgttttccgtaagtatttcctctttttcattatcacttttagggcttggccttttttcccaagattgataatagtaattgaggagctcattagttagcataacagagttatgggacataccaaatgctcctattggaaaactgttttctgaaaggttataagctttaatgagttggttatgaaagttctctgcactattcataagctcttgggtctgtttaattaaatcattcatagtataatatgtatttaaaaatcgctaataaattgatctaaaattatgtgataatttatattagggtgattcatttgaatatatttaatatttcgttagcttccgtatatttgaattgtttttctcctatttcttttaggtaacattcaaatgctttattcagttcgttaatacattgctgatgaaaagtatcattccctccggctaaaacctttttaaattcattggattccaagatggcccgatatagaatctctttagctttatcattttgatcagcagctttggctactacgaaatctttcttccaattagttgatatatttcctttagaacgcacattaactgatatttcaacgattacagagagtacggaccaagctatcaatgtagccatggcacaataaagtaaagttggaaggcccatccaattaagcccatctacaccctcaatttttccccacacaccaactttccatgcaaggcatgttgtgaagaagataataatagacgcgataatacccaatgcaagcactacttttgccattgtagacagtgtgctttccgctactgttagtttttcttttgttaccataataattctcttttttatatttgaaaattctgttactcgtatacataggataacgcctgatttatagcttgacttatggcttttgttatatcattatatccattactttccccatatcgagtttctgtttgtttgaaaaatacagatgtgatcatgtttttctctttgtactttattatttcaaaattggtatttttatatttaacagtcggtgcatgattaaaccagcgatcgagcattaaaaatgttcctataaagttcaaaagatctacttccattgaagtagctaagatgtaagattctatattatttcggcttattcccattcgaactagtacagacatatatagcgtgagtggtgaaagcgatgaaaatgtttctattttattgaaactttcaacttgtgttatttttatttgttgttcaatattatctgaaatattgcagatgtctctaacggagagtttctctattaatgaatagactgtagggaatttaggtcctacttgttggttgagttttgtatatggtatattgcatcttttgtttatgaatgtatacaaataatcttttgctatttggctaatggaataactgaaaggattatgtttcttgaatttattgatatacccggaataatttgcatctttcccataaaaatgatggaatatatgctcggtgacattataatcaaatacagtgacgatattatcaaatccaaacttgtttgatgggcaacttgtacctttttgaaatttgcagtcaaagtgcgaaccaaacacattgagtattctaaatagatgtgcaggatcgatacggtctaagtcttcaatgattaaaactgtcttttttgggggactatcttgaatctgatttttaatatgtagaagtgttttttctattaattgggtatatccgtcattctcataaattccacctttctgattttcgaaaaaaacgttgtatttgtctatgtctttttttctcttatcatactcattcttaaatgtttcggcttttttcattatcatcttcaaaatcggaccatctgctataaatgtaagaaggaaacttattacctcttttaaagtattccaattgaatattgaatcgatagctgcatttaaatcaattggatttagcatcccgtcgttagctaactgaagtagaatatctcgtttgatatactcaaaaacatctgcattctcagctacagaatagttcacaggatataaagttatgaagtaatatttttctttatattcttctttaaatttatcaaggaagaatgtttttccatcgccaaattttgcggataaaatagtcctttcgttaattgataaatgttcatcaaacattttaagttgtgtatctattggtatctgttccatagtttgtattaaaagttaattacgtttgcaaggtcgagataaaaaatggaacgaacaaggaatatgaggattttttttgtactttagcacaaaacaaatgttatggaacaaaagagtataatatctgaacagagccgtgcgaatcttgataaggatacggtcaatttttatttgaatgaagctgataaacaattagaaggtattgtaaatgtgtcaaacggaataacggaacgttcatacattttgttaagtggtataattgctatcttaacaggatttggttggattctgaaggcgcaagaaggggattggactttatatgtagtttctgttttgggcatggtggcttctatagctattattaccattcttatcttaaaagtgatatgtgttcatacaatatggttacctggtaaaaggccgtcagaactggatatcgacgtttttatagattattatagtacgcgtaaactgacaaaagaacaacgctatatacatattgttgcagatcatttagatgctattgaagctaaaatagcccttaacttacgtgatgttaagataaggactatttggtatgctcgctgcctaaaaatatgcctatatactatctgtgcaattgcttgcattctgatcgtaggcaattttatttagctttaggttttggtgcaccattagtttgaataccgctaccaggtcttacttgtggcttgggagtgggaggtgggtttgttcctttaggtatttgttttcccatagtattgaaatggcgaacctcttatcagtacgtgcccaaaggtttacatataccttaatccggttttacggattacgtactgaaaagaggttcatataatgtaattattcgggcagtgctaaagtagggataatttatctgataacaaaataaaagtgattttttatgtagaaaagggcttccaatttatggaaaccctatctgacctgtcaaagttatagctttaagcaggacctggttaggatgaatatatgcttagaaattggccacctcataatatttaaaaaagtaatacatagcgaccttatgccatttggtcagatccttatctccggagaggacagaagacacggtgcatttgtcaatgccggtgtagttactcaggtgcttggcttttaagccaagtttgtccatacgtcctttgatccagtcaacggtgatgttatcgatatccttacggtcgaagttaactgcggatacagtcagtttccagtcttcggggatctcgcctttaaacatttcacgtacacgttcagtcagttcctttttagagagaaacttgtcgtttaccagatccttttgttcggcacgaacaatcaagcgtccttctgagtaggagacgatttcaataacgatgtgcccataacggcggtactgctttgcgaactcttcaagtcgctttttaacctctgcagtgagagggagtaattctaaattcttcatgttgcatcaatttacgatttgacaatcgggttaatattcattttaaaaggtgggggaaaatcccccaccagaatcacaatttgataagttccaacttctttatgtcgaaaatggcaatctgcttattttcacgcccgaattgctttgcttcttcaaggttggtgaaaatccggacactgtcaaaatagaactgttcgttctcttcattcagccatccgccgactttcttttcgtgcataaaagcatggttaagaactctttccagtccttcttctccgaaactgtcttgtgtttcgaggtaggcgactgaaatacctcttgtgaccttttttaaggttgtcaggtcaaccgtgaaccccgtagggttcgccttggctatctcgagaatagccgagattaattgttccataatataaagaacttatgcggacgtcacccgcgtttgttatgactctgcaaatatatagaaaagtttgttactgacaaacttttattctctatattttagtggtttcttattttttcttccagttcgtcatgcttacgaactgattcatccatgctgtaaagagcatccatcagattacctttccggacggcgtctttctttgtcatgtcggagttggcaagggtatcgagtaggcgcagctgagagtcgaaaacattgtttctgatgctaccttctttgccggagaagacacgcgggaactgatctcctaaattaatcaggcaaccggtgataaaccaatacatgactattttctgtgtatccggcaaatggcgaagcaatgcggcgtctttatccaggcgattgatgtcgaatgtttttccacggtaccagaggcaggctaacagatgattgatcttttgcggatcttgccgcatggcgtcccggtaggtctgcatataaataaattgttcaaatgtgatatcgtacagaccatcatcaggaccgatgaatttttgcatccggatacgtagagtaggataggggttaacaaaacgatccggcttgatatagtattgtggagcaataccatatctttggttttcccgttcaaccaagaaatggaatagatgggccaagctgcaaacttcttccggagtgagcaggtatttctttcggcgaacacgaaagctcacattctcgctttctttaccgacggagatacgcacctgatcaccatagatcttacggtgtcggctgacatgtgcctttaggcaatacagcagcatgtagattttaacttgctcaatagagacatcgttttgcgttagtttgaccaggtatgccatatctttattgctcagttcgtcccatctttcaggtaactgatacttgtcatcgtaaatctgtatttgatgcatagttatgatattgaggtgaatactttcttttccttagagttaaagtttatggccgtagatggcttgtttactcccagatcttcagcattggcattcaagaagctgtttatcttaccggaataataatcggcttgttgggcgaagaaattgcctgtttccgtgctgtcctgatagattggccggagaatcggttgatattccggagtaccggatccggttcgttcctggcgtgaagtctgcgaagtgtacagttctgcagatttgtttgccaggtatcggattacatattcctgcaggatcttgaactttgcgtcctggtcagtcatggccaatagttggttatataaatcatccgtcagcatttcccgaacatggcgttcctgaagctgacggatagtaggcagcatggtacggtaggttagagtagagtagtcgatattcactaacccgatatcctggtattcctgagccgaccggatgaaacacggcacttggttagtgatactgatatgatccgcataatccggatatttcaatttgttgcgttccagataatcaagcagacgatcaagagcctgcatacctcgataaaagagactaacctttgctgcggcgatttttgcttcattggcaggtgaacgtttaccttgttcgttttgaaccgttataccgctatctccgaaactgataccaagttcattggtagcgagtgcaagggtaagcggaccgaggcagcgcaggatcttgtctttgagcgttgtgtcttcgccggtactggcgatatcaatgatcacattgccgacttgtggctcaatgtagatatcgagcgcatcgttgatatatggcgatacagactcgtagggtatcgctgcattgattttgacaaccgtttttaaggtgtcaatgtcgggaatgatagtgttcatttttcttctgtttctggggttaaacctgtattctttactgcgcctgttccctgatctaatgtcgtcaattggcagtttgtgatggagaagtagatatctttcggccagtcattgattgccttggcaaaataaagcggctccagtgtggctttctgatacattttcataagcgcttgttcgatggtaaacagttcccgggcctctgttccattgatactttttcccttgcctggtgatgcaccgataattgagggatgcacgcccatggcgtaacagatggtgttacttacttcttcgctgtcttcgatatattcgccgccgatctgttggttggttagtggactaatgataatgtctttatcctcgaatcctttgatcttatcatagcgaaactcagagacaaaggctttgccggcattttcttcacctgccaaaaagtcgttcatttccttcaggaagtcttcacggcattgggtcttttcgttgtcggtagtgaggtttttggccttatagagcttttcccaaaatgtatcttttatgtagattacatatcgcaaggtcatttgattttttatcagagcctttttatataccggtatggcagaactgaagtcataccatccggaggcaaagacagaccaccaatatgggcggcaataatagaaccgtccgggcgtattgatacgaatgttgtggatgaagttacgttctttgcatacttcttttttgccgtctttattcggcaactttcccatacgtactttcaggtcccgcaacgggctttgcctgtcgagcaatggcgttgcgataacgtcggtgggtgtacctttattccattcagccgaatagccatgccattcgctttttccggttttctcatcgatcttgctgatccgcgaacaagtcgtctctttcgctttgatctgcacaattttgggcggattattgttgtcacacaggtattcgacgtatgaatcgtagaagattgccaggtcattggcgacttcgtgccgaatgagcgcgtagttattgttttcgataaattcaaagatatcggggtactcttccggaagaacttcttctttaacgattttattggtaccggaatcccggtacttacggtagaccattactccatcaccgtagataactttgttcttaaactcgatattactgcctacggtgacgttatgacctatctttttcatgatgtcgtacatcatgttattatttcggccacggggcacaaattctatgggtgcgctcttgcctttaggtacaactggaatggcgttagtctccctatcagtgacgatatcgctgttatcgctgaactttataatatccttgccgcctttaacgactccataggtactatatccaggctttttaagttctactttttgcattagaaatacactttgaggttattaatccgggtaattaggcagcggcggatctttcgagggctgctttcgcctgcaggcagtacgttgatggtactgcctgcactgtgaaaagatgtgagtacagcgcgttcgtaagtgacaagctcaccggtactgcgtttacaatactgtaatgagaactcaactggtcttccgttccgacgtttctccatgatctcagtgatcttactttgatgtatgcgatctaacatatagtatgatgcctataatgatggataataagatgatgccgatggctatacttctttcaatacctgttccggactctgtttgcttttggctctcctgttgagtgtattcgttcgaggatcctgtatctgttttctgatatgatacagagtcagatgtttgagacgaaacattctcttgctgttcaacctgcttccggatctcgctcccctcgacttccagtttagatgtcgggggtagcccggtagtaggatccgcaggcttcgatgtgtcgaagtgccaggtgatcttccatttattaccgttgatatcggtttgcgtctgggcttggctggtgatgctgccatgagctttgcttgatagtctgacactaacgctatctgtctgttcagatacacgcacagaagaatgctgataagcagagcgacaattacacagcagtagggcaataagtattgccaggctaatgggctgcacatagttctttaggcttttcgtttggtacatgatagatccgtacatttataaggcttaagttcattacagagcttccgattgttatctacttccgatttaatcttttcgatttcagagcgtagttccttacgttcggagcgcatatcgttaatgtctacacgtaagtcattgataagaccttgatacacatcctgcatagctttcatagcattggcttcagcttgctttttggtgtacttcatggtgatgatagctgtcaagaatgacacaagaccaccacctaatacgaaagttaagattgtttgggttaatgggttcatagcttctttttttatgcaaatgtatcacctgagcacgtgtctgtaaaggacaggagcgcagcccgaaggcatcagggaggtaccccacgcgaggggcgttctgaggggggtagtgcagcatattagaggaaaaaaatctttcggtctgaaactttttctcagggcgatgcggggtcttccgacagaaaaaggggaaaattttccccttttgaactccttttttgctaaggtacaattacttagattttttttcatgggaataccatgagattaaaaaaaatcgcccgaaaaatgcaccggcacaaacttttgtcgtgatcgcaagctgtgacgaaagtttgtgccggtacatttttcggggtttccccctcacattcacgcctttggcatgaaagagaggtagagcggtaagcgtagacgcttctgtaatctccgtttcttttccggaactcccttatcctttcctatcgtgcacggcatatctcgccttttgccccgcaaatgtaggtcaccggtctgaaaagcaagattaaacgctgtttcgggcaaaaaatctccaccttacaggtagtattcaggcgttccgttttcccgaaaatcttgctgtcattcatcctcggcacctcaattattgcggtatcaaaaggcgaaacataccgcgcgcgacaggcgacggaataaaaaaaagtcgttccgggaaacggagaaaattcaaaaaaggctcacacccgacggctcaaagttcaagaataaactaaaatctaaagttatggcagcaaaaagaaacattcccgaggcatggaaacaacagtggtctaaattcatgttcaacttttttgattatttacctacaaagtacgaagcgaacaagcgtgaatgggctatcagaaagatgatatgggactttaaagacggaaagcgtagtgtatcagtggcggaactgatagcaaagaagttacggtcacagtttggcgcagattgcgaaaatgtaacgttcgtatgcgttcctgcaagttctgcagagaaaaacgaaatcagatacaaggtatttgccgaggaagtgacacggctaacaggctgcaagaacgcatacggggcaatcactatcgagggcggacgcttggcgatccatgagacgaaaagcagtaagacggtacaggacgttgaagttattaagtttgataaaggctttttcaatggtaaaagagtactcctttttgatgatatactgacgcaaggtcattcttacgctcgctttgcttgtgcacttgaaaaactgggtgcagaagtgttaggcggctattttttagggaaaacaattttatcttataactcataaacgcataacaatgaatactttatttgacaatgattgccgctatatgagcgacagagaactaatttacgagattaccaataacaggcaaatcgtttcagacatcgagcggaacaatggaggcatagaccttgataaactgtttgcatccttgacgcctggacggaagaaagttgctattgcagcagtagaaatgtataagagacagcagtctttgcaggttgaacgcaggcagattttttcaagcaaggatgtgtacgaactgatgcagccgttaatcggtgacttgcgcaatgaggaattttggatagtggcaataaataatgcatcacgaataatcaagaaagtacaggtttcggtcggtggcatagatcagacctcggcagatgtgcggctgatcatgcgagtattgatagaggcaggagcatcactgtttgcagcggtacataaccacccaagtggcaattccaagccgagtaatgatgacagaaagttaacagaacagctaaagaaagcagcggatatatttaatattcggatgatggatcatgtgataataaccaatcagggatattatagcttctgcgatgaaggactcttataacggggtgggcgtgggtggcgcccattccgtttgctcgcacgctcgcaaacggaatgggacccgaagcggtatttatgagtgatttttacgttccttcaaccacgtaggggcggtgggttattcatttttttaggaagtagactccaccggatccgctgttaggctcacggaagaagaagttcattccaagccaaagagtatcaaaagcatcggtaacatgtgttttgaactgatcaggtgcatccggcgtgtcttcagtcccttcaggtgttttgtctttttcaaatccattctttccctggcgaatacctgtttgctccatggctattttgagaaattcgttttgatgcagatttatttggatccaaagaaattccggatctccttttaatgtgcggtcgatattcaggtgtttccaatcatgttttgccgcttggccgataaattccatagtaacattataattattttctttaaatatacgttcgatcacatcggcatagctttcgccactggtaccggtttcccaggtaaatgtgtgatcatagtagactactatctcgtgattgaacttcgggcggtaatagtcggctacctgtttgacaagatcctgcaacttacttggtgttttgacataaaaagacttcagcacacgcatggtattgccatctttttgggcaacaacagcggtagatatcgaggcgttggagtcgaaagcaatatgcagttccttgccgaagtcaagatcaccatccccgaggcaaccacaggttgcaagttttccccaattactgccgagatcccggagccgcccgctgtcattcggtatgtagaaatgtatgttatcatccagagcggaataaaaaccgttcgggacccggaatagtcgttcgtttaagaaagcggtacgccagattagtggaggtgaatcccggtgcatctgccaaatgtaatcctctcctaaaacttcaagattgtcgaagacgtcatattcaccgtagaatatggtgtactcacgttttttccctggctgtggtttgactaccggctgaaacttccgtgcaaggtcgagatcccgggacagttctttgatcatccgcagagtgtgatcggtcatcggtttgcgcttgtatgcttgcagttctttatacaggctacgaatgagattgatgtgaggcggtgacatctcatccaccttgtctaagatccatttacccagtgaagcggttggcatatcgcttgaataacaaacactgtgatggtgtgggcagtggccgaaatactgttggttgccgcgattggcagggtttacctcaccttttattttttcgtaggagagaaactttgcttcaggacctatcacccaatccagtgacattgaattggcagacatggcttggttaaacgataggatcaccattacggtgccgttccagaagtgaaaagcattgctccacccttcccccacaacagggcgtaccgggtcagcaaagttcatccatgagggtgctttatggccgacaacataatgaatgttttgataatagccccattctgccagagccttgcagattgccggcagggtattgctccaggctttggcataactgggcgatatcagaccgcccagagagccgggcatctcccatacattccggagaatgaaccgggcgtcgataccttcagattttccggtaccgcgcgaagcgatgatatattcatcatgtgcgctgatggccattgcctggcgctgcatcttattaaagaacttcttcacgacctcggattgtttcatccggagatcataagctgataatggggtaggcattattcgtcctcctcttcgttgataatctcagcatcgaccgctttacctttcgccatgctgcgggcgagttcccgcagttccttgcggcgttcttccagattgtcaataggttcaagtccttccaggatggtgatatcatccgaaggttcaaaagatggagggatcattctttcgaagtcgagccggttatcttccttgtccgccatggtgtactttccgatcttgtccaggttagcggcggcacctttggcgtctccgctgtcaatcgcaagctgatagccttttttagcaccttcaacgatcatgtaccggtaccaattctttgcggcaagttgtatattacctaccaatcggttaatcatactgatatcccggtaggcttgtgactgagagacaggtgtggcgtttccgccgcatccgtgcataagaaagttaacgagttctgaatcttccaccaatggactatccattttcttggcgacacaaagtatcatgcgttcccggatctcttgttcccggacggtgagcatttgttccgcctcgtctttgtctttatataaggcgcgttcgatacgttcgtatgtggtatcttttttaggcataggctattcgttgactatctgttcacgcatatatttatcggcaagtggttcggctgccggactaccggcttttgccagcttaataactgtctggcgcagctcgtatttggtctgcaatcgcccttggtggtaggcattatagataggggtttgtcgatgatttttgcagatatcacagaagtagtctcgctgatcagcggcgatatccaacaaaatggctatttccgacggtggtaataatgcggctgacatgctgcgtatatggtttaattgttcatcagttaactgcatagctcatagcgttttcgtaggcttggttaaatgtctcggagaaataatcgaaatgggatccggcagtaaagtaaaccccggcttcccaacggtggttaagattcaagttggcagatccgataataccgaacttgtatcgctcattttcgactaacaaaactttagcatggcaggaatctattcgtatttccggagagatgtttgcagcgaataaaagcaaatctatcttgtgccgtttcacggtagtatcgagcaacatccgcaggctggttatctgactttcttcggtcagaaagaagagtgaccgtagactgtcttccgatatgctgaatgtagctatccgcacacttgccggcccgatggcagataaaagagtgggcaacacttcgtgtattgcccattctcccttgtgcatgaacggttcgatagagccggggcacaatgcaagcggaaagttatcctgaaactttttcacctgatatttccttttcaatttctgccagttctttttcgtatccggcaatgcggctcattgcattgtcgtacacgacctgacgaccgtcttctttggctttatcggcggatcgttgactattgataatgttttgcttcaatcgtttcacatgccgcgctaattcaatgccacgtacaaccgggttatcgctgaataccgggcgtttggcatccaggttcaatgttcctttaccttcagaccaggtgtcgatagctttccagagtctccggcgctcatcatccagtttgcaaagttcttcagccaatgtttttcgggcttcatcttcgatgtccgggttagcaatgtcattgtgcaggctggcgtatagaggtgctatttctttgattcgggcgtatgcttttttgatggatgtcggcatagatgcttctgtcacaacctttacaccggggttgctcagtgcgtctacttctttgcgaagctgttccagttctgcatggtgttcgtcaatctgttcctgaagctctgagatatcaccggtgttgtcgctcccctccaggtcttcaattcgttccgttaactcttcgatctgttgctcatgcgttgcgatggcggcagttcgtttcgtcagttcttccgtgcgtgccttttcgtctacctctttggcttcgatgatagactcatttgccgccggataaagttccggagcttcgcggatctcgcgggatatccgtgtcaggcagttgatcagttgggtgaagtgcggatcgaagatatgaggatttgccggagctgcagcaaaatagactgaatacttttctttttgcacttgcctggcaagtgcgtcaaagagggctacaccgtcagcgtatttgcgctgacggttgcctaaccaatttattaattgttcgttcctggtcataatgctattcttgtggagccggagccggtttattaccgcctattacttccatatcgatgggagttgctaagaagatggcagaatagttagaatccgctgtgactgtgtaagtggtaccacgtcggtcggcacgggccttaccgccattgaaagacggtgataaagagccggtcaaaccgggttgacctaaaatcatttggttaccttctggatcttcaaagatataatacccacgggtgtttttggccatggcgttgaatgcgtgcattccaggagtattaccagggaagaaaaaaccgagcgtctgtttaaaactgatgccgtccgcttctccttgtggttctgctttgtattccacctctccatcggtactatataagtaaatgggctgttttatcgaacctccttcagcaaaagtaaatgaacctgcagcggtaatcagttcggtgttgtcggtggctttctctggatccggtacggtcggtaccgtgattgccgcttcttccggtacgaataataagcgagctttgtagccggccatattattctttcccatgttccatttgagcggagcaaaagccggacctgcagccaggatcatagtcggatcattcagatccaacgataaaaggtgttgtgcttcaggcagcaatataactgccagaaccaacacgaaagcgagaataaatatttgtttctttttcattgtgatatactattttagaagtagttaagcggagagagaaagttccctccgctaatgataaattaggtgtactgtgcctctattgtagtgacttcaccctctttgatagtgacttcctggtttaccggttttgtcttaccgtccacatccttgaatgtaacggtgtgcttgccggctgtcaagccaataaagtactgtccgttggaacgggtagacgtcttgccgtccactgtccaggatcccccgtcggtgccggtgatgtttacctgtacggcgccggttaagcagtagtcgcctgccaggtcgttggcttcgttcttctgttcattcgttcggaaaaccttttcgtgccagtcgttgatacgcgtgtcgtatccggcttgcagccagaactgccattcgttgggatccgaatagatatcgcggatctgacagaactttgttgcagcttgagtgttgaatgcaagatccatgttaccgactttctgcaggatgagacgcgatccccggccgattgcttcgtgtgttacgacttccagagtcggacaaaaagcgtcttcgcgaagaagctcaatcatgcgggctacactggggtattcctgcatctttaacttataacgcaaagctgtccgtgcggccttgataacggtttcagcacacagcaactgtggtatgcctccttgtgagctgcgcagtgaattgtgagcaccaccgatccagtcaaccagattttcatacgcactgtaatcgtcttccttaaccgggctctcgaattctccggagattgccaggttgccgcgagcgacatttacagcatccgatacgatcaatttatctgctttggtaaagtaaccgtcaaatgcgccattgggtgaattggagtcttcatcacgttctgcatggaacaaagagtacacgatatcttcagcgtgagaggtggtcaagccaaacacgatcttggtttccatcggatgtttctttgtgatattgctcacaggagatccaccgataaccagtaattcgttatcatcatacttctgagagttctcacgtgtgatgaaaactacatctttcggttcgatcagcgaaggttcataaccgaatatctgctcgaattctttgaattccttgccaatcttataggattgggtaccgccggctttgcggcgttcgttgatacgtgaatgcttgccttgcaggtccatcacgttcagcttgagttttgccgctacctcgcttaaagttgcaaaaggcagcgtgcggagcgccttgtcataaataataaggctttcctgaagttttgatacatctactaatttcataagttaaggtttagattaatccttcttttttaagtctctcagtcatggtggcatagttaccgtcactttttgcacagaaggatgccagatccgcttctccttcaccttcaggttcctgtttcggagtcagccccttgctgtcatgggcagcattgtttttcaggttctgcacttgctctttgagctgggtgatctcggtatctttgctttcgatactgcttttcagcgtgctgatctcagtatcctttgtttcgatactgcttttcagttgagcgacttcaccggtagaagctgtcagcttctcgtcaatgtccttcttagcctggacgagcgttccgttctcatccttcagacgcttcatctcagcgtccagagactcgatattctccagggagagttcggtcgtggccgccttatcgtctgtaatcttcaggaaagcacaaactgttttccaactgggtttaaaattcataacgtttaattggggtttaggtaattctggcacacatttcgtatccatgcccgtagccagtaaagcggacgtagaacggtcatataagcgtacggcgttgcgatttgccggaatgtcaacgatggatgcttccattaataaggcttcagtcacggtttcacgtgtctgtcctggcagaagcagctctttattggcacttgtggcaatgatttgtataccgatggatgcggcggagaaagtccctgcttcatacttcgcggctacctctttggagaggtcgtctaccttgtcgaaaataggaatagcagaaagttcatcgccgtttatctgtatgtcttcccaatgaccgattgctttagagttcccccagatgggtgaaccttcatcacgaaaatgcatatacagcatgaccggattctttttgaaggcttcaatattgaggccttcagtgagaacccggtaaccgtagcaatttactgatgaatcggaaagaatgatgcgattttgactcattgcattatttttgatgcaatgatacgcagtaataaagaggtgtagaaggacgctattctgtcagtgttaatgctggatgaatgcaggttgcagagatggataactcataatgtctgaagtctgacggcttttctcctggtatttctgcaaaggttccgaacagtggataattcgggttaccaaaaatccgcttttcattattgttggtagttgcgatcaggatggatccgcgtgcggctacttgttccagttccgctatcaatcgcttatcaacccctgcagaaagcagactgattattgctttgtgtgtgtacaaggtaccggaactctcatttttgggagtggcatctactgaggctccactttgacgtaagggtagtaaacgttgggtatctttgcttttccgaaggtatacgccggagggtgaaataaccgcaaagtatgataactcgtctataaagacaagctcaacagatttataaccgcctaaattgttcataactgattgattattagtgattgcgcatgttttatcacgcttttactcctgtttttacactgtttttgcacgaaaatcggacaattaactacacttgctcgggttaactttttcgggtgtattgccgtttttcttctttcggccttaccttagttcgccaacggtagtagttttttaaaaacgcatcttccgtaagagaagaaattccgtacttgctcataaaggcatgaataccgactataaagttcacaccataccgatgtttctgttcgtctaccgtatcatgtaattctgcccacataagaagttccagtttgcggttaatgatcatctgtgaccgcattccgagatagttgtatgtctccgggttcttaccgatggatcgtgcaggaagataaagagtcaggtttcccttatctacttggtgatcggcagggcgtttctccaataaatcatatatcacatgatagatatctaatgaatcgggaaatctgaccgctgtgtcctcaaagttacagaacttcccgatcaggtattcccggatatgtgcaggtacatttatcttggtagtcatggttaatagtaaaagtgtatagagctaaagtaataaaaataagtggattatattgctatcggtctacatttttagtatcttatagctaatcccaccccttgcgatatcagtactatttttttgtactttagtgcaaattgtacctgtgttgtctttgtctcttctgattatcagtattttacggccgtacaaaacgcgtactttttctgtacggaatttcattctgcgtacaaaacgccattttgtacaaaaaagtacaattcgtaccgttttgtacgaaaatcgtgcagtgtttaaatctttgatttataatgtaataaatgccgaaaaacggggcttcgtacgaaagtacaaaaatatctctatttttatgcagggtgtttttgaaaaagaaaaaaataataaaaagaatatataggcaccctcattccgcttttgccgtccatcggcacatctgttcaaaaagtttgtttctaatgaaaggggtgggaggggaaacggaagaaaacaaaggcggcagtacatgcgtaccgccgccgatagaatgctccgctctgtgtttccgataatactccgccttgtgcttacaagaatactccgctttgtgttatctgaagtcacttggataaaaggtatgcgacacgaactcatattcgcgtggcaggctcttaacgcctacaatcacgcaaatacctcgtgcggctagttcataaagtctttgtgtggtgattaccgatccgcgaaaattgtagttgctgcagagcacgaaataagccgtcgaaagatcaatcgaatagatatctttccggatgattttaacggcatcggattgaatcagggcaaagccgtagcgaactgccaggcgtgcgatcagctgctcgcgctcctggcttgttggtgctactactacctgtattttattctctttttttatcataatattattgcgtatgtcgctaaaattgcctacctttacagggtaataaattgggatattatagtcttttctctcctttgcggtaggggcgcgacgggataaatttgcagcatcttttgatcattgaataatcatccgagaactccaacagatcatccgttatacttttcctgcatgtgtcttcgataataaacagacttgccaccttaataaacatattcatagttttcttactacagtgatctgctatgcgcaagacttcaccctcctgaatgctgagtaacttcatatagacagcattataaaagtgcataaaccgggtgggttcctgctcataaagaggatatagttccttaactaattctgaataagtcggtgccattacaatgagtatataggttctaagatagcatctattaagtccaggtaagcgggttcatcttccggttcgtatgagatcagtatatctatattaccgccggaggccctaccgatttccatgtggatcggcaagttatcttcaagtatcaattctgtcatgatcctggctagacgcgagtcgattgttttcttttttaagatcatattaatagtctaatagttcattgtccgccttggtctgaaacggcaggtttgggtaatcattttcagtataatcattgctttcgggagcgatatctttgcatccgactgtgaagtattcaactccgccggctttgtcgtcaacaatgggattaccgtccttatcaaactggtggggcttaccggttaccggatcatacttatgcgggttgaatgtgaagcctttccattcgcaataaagtttaaacttccttttgaatatagttgtactgttgaatatctttttctgagccgggtcatagttgcaaaaagagtcatagagttctttccgtaccaacctggtattgagatgtgccgggtctgagaaatattcgtctgcccaggaaatcagcggttcggtgatttcctggcgtagcttgcgctgctcaagacgttcgcctggtgcctggataactccaaactcaagatagagctgaatacagtttgcaagcaggttccaggtgaggttccattgatcataatcccattcggagaagaacaggcagccgaaatcatctaatggcttatgtacgtcgttatagaagtcagagaaagcgatcagccattggcgatccttaaaactggagccgtttccccggatggcatgattcgtcggtatgtatatcttggctgacttggcaaaaggtatggtaatccttcggccacctttatagttgatagtccagtcaccggtaataactggaaacaaaaactcaaagttgaagttctgcagcacgtcatcaatgaataccagctttgtgttttcctgcacatcattccagataaattgatcactgaagatatcgcttcgttttccggatatataggcagtaggcacgacattacgcataagctcaccaatcagtgactttccggagcgtccgttagactctccgacttctgactgctttccgtccatgccgatcaccgccctggcgacattgttgtcttttgcctccatcgccatgtagccgatagcacaaagtttgctgagtaaatggatccggttctcattctcttccgcttcttcgatttcttccggactttttctccaggtgaaattactggcattgatcaggaacgttaagaattggcaggaacttccatcttttgtaatatcataactacattggccgtccttcatcttgaagcggatcagcggttcacccaggtacttggccggaatggttttcttctgttcttcccagatatggtgagtaatgctttcataaccgatttcttttactgtatctttattgatataccaacagttcttatcaaagtagagatattgactttcccggttcggcttgatgaagttgggttcgatgaatccgagcagagaaagtttgtcaggccctacatattgggatactcctttgatcagcatttcgttaacctcttttttacagtaatgtttagcgaactgaaacagataatcgcgtgcgtcactggcttcgatggggcgaacgactggcggatccaagtgaatgaactgaaaacttcgatccaggcgccggaggcgaccaaagcctcggttctgcaagaaattctgtgagttgacatagcaaaactctatttccgtacgttcatttccggaacggtcacttttagaaacttcattccaaaacttttcatcatcatcaaaaggttgtgccaggactaacgttccggactcatcgaacttccagcgatatcgaccgaaaacaaactccggaagattgatcagcacatctttatgaagttctgcaaaagcctcgtgcgtatgtaggcaccaaaattcttgcagcttgtgatcggttaaggtggtaaccttaaacatctcgacatatttccctaaacccttcttatcattacaggcataatttatatctgtggccagctcgtcttcttttcctgagagagtgtttgccaggatatcgtcaagccctttatctccggcgtcattcttctggatatgtccgatgaagatctcgacatagatattgcggtttttgagtgtccgcatatactctttaaagttccttgcggcatagaagaagtttcgaggacgcttttctacctgatcattgatctttatattcgttgagatatcgttccagtcagaatcaaagataaacgcgacctctttaacctggcattctgtgatgatacgcaccacatcttccggtagagatccgttcattccaaggttctgaatgccggagacggcaatcgacggaataccgtgtttgcatgccttttccgctttcttttctccttcctgaatatagaggcgaggaataggtgttttttccttaaacatcttacgtatgcgttccggaatatacaccggtgttccggatccgggaggcgacttgtacttaaagggtttcccttccttgtcaagatgtgagtccgggaactgccagcggacccgaaagtattctttcttttcgttggttatacgtttcttactgtctttgcggtagtaggtgacaggcataccgtcaagatcataatattcgatgataacatcgtcgcccttggtgatggctccacgttcatcaatagtacctgggcgaaatgttcttagctcgaatatggcttgtttatcatcgcttttatacacctttgcagtaacatcctcaaaggttaatccggaagcagccagcatacgcgcacaatagctgtctacatccactcctttagctgctttactgccttttttgagcttctttatctttttaggttggggcttctcgtccagtaggacattgaaccggttagccaggtgttcaagtgctgcagtgtattctttgccttcaactttcatcagaaatgaaagtgcaccgctgccgtttacctcatggcatgaaaagcacccaaagacctctttgttcggattgatactaaactttcgggctaccccacagtgaggacaatcacaaacataattgactccggattttcggagttcatgaaaatcctgtgcgacatcaagtaagtgacctttagatgcctctgttattcgatcaatgtcatttttagtaaagtacatagtttcctatttaatcattctgcgaattacggcttttctctgatgtagtgacaggactacatcagatcagctaacggcactcatttatatcagtatttatatagccatatcgtaggtataaatgaatgcaatccgcaatcagttcccagatatacgcccaatctgttgtatcccattcgtgataaaataatttcccgaagtcactttcgcccctgtgctcttggccatagtaatcagaaaactgaagtcgccacatgcgatgtgtcaaactgggatctttggatgtcaacggttgagtgcttgtcaatatgagttttggtgatttactgaatggaagaaaactgtgccgtccacctcttttgttgatataccaatcccctgtaatattattgaataaggtttctaatttgaatgattctgaaaaatcctcaatgaggactatcttaatgtcctccggcatttccgaccaaaggaatggatcaccgattttgccttgcacaatatacattcgggatatctctttaaaaaggtttgcaaagagcgtttttccgttcctggtaccggactcacagaatacagcgcgaggattgtttagatccttgtacccaatgactaaatatcctattgcgcacaacttactaagcagatgcacattgtttctgtattcattttcagatccacaaggttcgatcatacttgtacgttttaaaaactgcagaaaatcacatctctctgcattctcagtttgtgtgaacttgcacaaattgtttctataaattgcatcaatcataatgtttttttaagttattattctcctaacagataaataaaatcattgtcaatatagatctcatatattgcatcgttcgactgatcagcgctcaacagtctaacttcttttgacttgtcttcaatctgagccagtttgttgataagttcctgtgctgtcatttttaatccctttcattgctgtttttcattagttacttaatactgttcagccaatttaaagcactctgtaaattggctgcatagtcggcattataaatatatgaaacttcatcacctggtttataatctcgatcattgtcagtttcacctaaaacaaactccatatttggagttcccagtttataaacacctatacaataagtagtaccttcatgcttgttactccttttgattgctaaaagaaaaattctttgcttcattatattactcctttataattagtattactcttttgttactttatagcccttctctttaagatactgtgctatataatcatcatctccgacatcattcaggacatcgaaaagataggcacttacatgttcagcaactgcatcagcattcgcatagccaatgttttgcgaaataaacttcgctttctctgttcttcctaagcctctaaaggcttcttctattttgctcattgtatattatttaatcattatatttttgcataaagtttcaacatcagagtgtggaataaggccgattgctcattgatcatgtagatcgtaagatatgttcagtccccacacttttacatcagaaaccggatagttcaatgggctttgaccccgcatttgcaatgatggctcaagatgtatagatgtttaatataaaatattaagaccatgacttacgttggaattgatgtcagcaaagcgactttcgtagttgcttattcttctgctaaaggtagtaggacaaactctttcaagaatactatcaaaggtattcatgagtttatccaaaccatttctgtagcggaacatcactgtgttttggaagcaaccggtaattatagttccttactagtttacctgctttcagaagcgggtatagctgtcagtcttgagaaccctctaaagattaaaaactttgcccgtgttatgctctccatcaccaagactgatgaaatagacgctcgcttaatcgccatgtatggtgagaagatgcagccggcaccttacaagttgcgtagtgatactattcttgtcttaaagcaaaagcggacggtcatacgtcagctcaagaaacaactcgtagcaactgggaacttgaaaggttccatggaggcacttccattctttgatcctaaatgcaagaaaacaattgaaaggacaatcatctttcttgaaaaacaaatcaaagagttggaagaagaattggcttctctggcgcaaagtgaatacaagaaacagatggatttgcttacttcagtcaaaggtattggtgttacgctggcagccgcactaattatggctacgggaggcttcacctattttgataatgccaaacaactcacccggtacttgggcttgtcacctacttaccaacaatccggtacgtcagtcaatgtcaaaggtcacatcaatcgtaacggtgattcttccttgcggagccaactttatgtggcggcttttgcatctttacgatgtaatactgaatgcaaggcatgttttgaccggttacgatctaaaggcaagccaggaaaagtagcgctcattgcagtcgctaacaaacttataaggcaagcctttgctattgtcactcaagaaaaactctatgtagatgggttcaagcctgagaagccataaagctcctgcggagggaacgccatgcggcaaggggctgagcaggcagccccgacgagcctctttaagtgcgataattgcataactatgctaattatagttaatcatattcgattttcttattatagttcatatttaaattgttataaactaaattctatatttgtcgaataactttttaagttcttcctcaaattcagtttcttgttctctggatatataaatcagagttttgtcattaaccttgatttttgcttcatattcatctacttcctccaaaacgaattcaacaccaatattttcataaattgttcttgccatattcttgttcctttcttattagttatgattgtctatccaattccttttcatgctcaaatagaagaatgtcataaagattctttgtctgtttagtctgggcagtaagaaagccacaatatttcatatcgtcctctaccaaacgactataattagacatgacttccgacagttcttgcgattgctctttaagagtcaacttcacaaaatcagttttgatttcatcgaagtttttaaaataattcagtttcatatttgttcctttctgattagtttcctccattagtttttctggaaatccctaaataacttttcgatttcagaggtagaaagggtttttaataagtccttattttcaaaggcaacttctaatattacttttattagatgatctgcattcatacttctgattattgctaaaataatatctacaggatttccaaatattacagcggccattgaagatttatcttttacctttccggagagaatacaaataccattcaaatcttcgcttgtacaattggttgcaaaatctactaatatcttttcaatattctttttttccatttttctgattttattgtgagagtattttaaaagtaccgggtaccaccccggtactaaccctaacccggggctgtcccgacgactgtccttttcagtcggcttcattaaattattaatataaagattgctctttagcgagcgtgctttcttgctttttcaaactttgcccggagttttgccgcgtgttgcggtgtacataattcaggcttaaccattatgatcgttcgcgcgtcgattcggagcggttttttatcacgatcacgggagtgttgccgaactatttctaaatcttccggattctcattaatgaataaatctgctttagtacgtttatccttgcttcttgatggggatggtgtagtaactgttctcatagcgtttttaaatagagatatgcgggacgggaactataccgccccgctgtctcatttgtgaatagaactaatgtataacacataaaccggactttaccgggggattccttaaatcccgaaaaatgattaataattaattaactggatgaaatctcgatttcccgagcgcgcattgggatccggatttctatacgtgctcgcctgttgcggctaacaaatatctgactgggtttaaagtctatacctgtgaagacaaaaagaacgagtagcccagtggctaatctcattcttgccacaggggaaagatcaaatgatatgttgaattgggtgcagaagaaataagctgagagctctgcagctttttgtaggcccgtctttaacttgattttccgaaccgtgttgtcgacggttcgaagtgctatgccgagaaagctcgcagtttctttctgcgaagctccccatgcgatgcattcaagtacttcaaattcccgtgatccaagtttggctttaagattcatatagctcaatttaggggagagatatcccatacatcaaggatattatattctccgaatacagcacttatcttttcatacttcggcaggctgatatctatgataccaccattaagaagactactgaagtaagtcaggcgagagattttgagcgcggacataagtttttctctcacctcctttttctgtgagagagtgacttgtaaatagccctttttgaatgaatagcgttttttcgctattgcttttgtttcgtttttatcgtacatttgtttcactgtttttgaaataacactgcaaatatattagaaaattctaatatatcatctttttatattagaaaatttcaatatgagtgaaacttttatagatagattagatagatataaggaatacgccggtttaaatgacaatcagataaccgtcaagtgtggtttgaccgtcggtattattaattccgctcggaaacgaggtagtagtctgtcaggtgagaatattgaaaaatttctaaatgtattcaaagatgtcaatgcccgttggttgcttactggagaaggtgagatgattcagaatgatgaagtatttgcagccaataatgatagtttaacactttatttaagaaaagagaacaaggaattgaaatctaaaaatgaagagttaaatcgtgaaataggtaagctcgaagggcagatcatagagcttaaaaaacatgtccatgtggaggatgttgccaaatgtgccattgcaagcggctccgatttagtggacaagagtacattataaataagtattaaaaagaagacaagctctgaggcgtttctggagttttttgaggtaatgtagttcgagtgtagaccgacactaatctaataaattgatagtaagtgttgaagatactccgccaggaacctcaaaacgaacaaaatgccctgagtagaaatacttggggcatttgttgtttattgaccttcagtaacttagctaccctgccatttggggcgaaaattgtgcgagtgtagaccgaatgtagtccgagcctcctaaaacgatacgattgtagcacatgaaaagtattaattttaggtttttccctatcaataattatagaattcaccagttagttctcattttcccatattacttttgttacaaaccaaaagaaatacgccatgaaaaagattctatttatcctatttacagttcagtctgttttagctccccatataacgaagagctatagtgttaattctatcgaggatagttacgaatattcgatagtcaatcaagaaaagaaaacagtcaaaaaagacattttaggcaatacgattattgaagatgataatggtaataagattacgattaaaaaagatattctgggaaatattattattgaaggtaataatggtgataagattacaatcaaaaaagacattttaggaaatattactattgaaaacaataatggtaataagaaaactattaaagaagatattttagggaatacgattattgaggacaataatggcaataggaagactgtcaaaaaagatatctttggcaatactattattgaagacaataaagggcacaagcagattatcaaaaaggatatatttggaaattccactatcgaagactattaggtagacattcttttccatcttgttttcttccctttcggaaaaaagtatccatgaaccctaattgttcatggataccattccgttcgcgtggctgaatattcctttatcaatcagcaattgtatagtctgttccgttaccatatctagattagttcctttcctactgaaaccaagaagttgggaagtcagccgtttcagatcttcggtcggcatagatatctgttgctctatggcatagcgggcggcactcattacttctaggattggaatatccagaatatcgcgtttggagttgatgcggtaaaagtcgcagtctttagctttctcttcatcttcccagtaaattatagtatctcccgataaagggtctttatatgcatcttcaagaagactgtcgataaatacctgtaaacgggtggtaactcttgttagattccaaattcgtaatatccttttatatagcagagtatttgttataggttgttcaatcttgactatttgttgaagttgttttttaacctgataagaggaagccattacggtatcaatatctgtactgtagcctatatcgggcaagtcagcaaatatatactctctttctcgattgttcactaactctacaacaggctcattctctatactgaatgttttcagaacattattctctatcggaagaggaggctgttcttctacttttgtgtttttaaaatcttccagctttttgataatgcgctccacgacgttctccttatgttcaaaccagtcgacggaccatacacgcattacattccaatggagcatctgcaaaacattcggttgtactatttcacggtcccttgtagtcttggtttcataatagtttctgccgtcacacaatattcccagaatatatgtatccggttgcaacggattgacaatcgctaaatccaccttaaagtttgaccgacctaccagagtatccactttataaccgcgctgagtaagttcctgtgcaattaaagtaataagattactttgttgcaggttctgtagttggatggccggaacaggtgaggtgccgcgttctgcaaattcaaggaacctctttaagccttccacacctttggactttgtacgtttcaaatctatttgttcggagcgtaaggttgagaagataatcatttcataacgtgcacgcgatacggctacattcagacgacgctcgccaccttgattattcaatggtccgaaattcatagatacattaccattcctgtccggaccgtatcctatagagaaaagaataatatctcgttcatcaccttgtacattctccagattcttgatgaaaataggttcattactttggaaagctttttcttccaattcgggatatttgttcagctcctcaatgagcatatcttctatcaaattttgctgtacttggctgaaagatacgacgcctatgcttttttcaggaacttcaggtgtacgtagccggttcagtatttctttcacaatggcttcagcttcggcatgattgctgcgtgtacgtcctttatcatatgtaccatctacctgaactaaacgtacttttgaaactctgtcatccacagaaggaaaagtatatagctttccattgtaatactgagaattactgaaagcaatcagactttcgtgtttgctccgatagtgccaagtcagataacgggatggaatggataacgagatgcaatcatccagaatgctctccatatcgtcaaattcagcttcttcctcgtctacttgtgaagaggagaagaaacttgtcggaggcatttgcttgggatcacctactacgactaatgcgttgccgcgggctattgcaccgactgcctcgctggtaggcatctgtgatgcttcgtcgaaaataacaagatcgaacttctctgcatccagatcgatatactgagccactgatatcggactcatcaacatgcatggacatagcttgggcaacagagttggtatctggtctataattctccggatagatgtgccgcgtcctccatttgaaatgttcctttttagaattcctatttcggaactggaggcggcttccattgttagtgatggtattctggctgctaatctacagtatagttcttttttactcaactcctgaaaatcgatagtcagttgtttgtatttactgatcatttcctcaaatagcaacccgttgaaaaggcgtaaagtttcgtccgcatcaacggtttttagagctaattggtgataaacgcctttcatatacgcattagaagcttccgatccgcttttatgcttatctgttatatagttgataactacggttaaatgaagagattccaattctctcttacggatgcaccattgtccccaatctttaatcttattgaagtgagttagccaggtattcagtagaaccggtagtttcacttcaagattattatccggcagttgtatgtagcataaaccttttatttcattgagaaccgtattcaactcgttggatgtatcgattagttgcctgaatgtatctttattagactgttggaatgcgttccagtcaatactgattttatttgcaaattgattcagaacttctgcgaattgctgttgaacgattgctgcgtattccgataaagtgttgtaaattatcggaagattcttaagtatagaatcaatatcatcccatttctctttgctctttcttcctaagaagccgaaagaagatgataattcggaagattgttcttgaatgatcttattattcttttgataagcattgagcttttctaacaggcttggtatttgtgctgcctgcaaacttatattgtaaagtctgagctttttcagataagaacgtttggcaaagaatttaggtaagaaccatttcaattcgatagctttccattcttgttggagggcaaatgcattttctcccagaatttgaggtgcatactctttacccagttcagcttgtaactgatctcgcttacgaccggacaggacaatatctttccattcttctatcaagtcggtattaccacccatttccaataacgttttattcagatatgggatggatagaagctggttacttatcttgcccatccagttgattccatcccaattatcaggtatcgagattcccagactatttgaaagcaactttctattagcggtaatcgaggtgaataaatttataaagcgcctgattccggcttgtagtttctgagaactttctatggaagtatcgtatggctccagtccctttaatgggtggtcttgcggatgccctgttatctgaaaaactgtatccagttcctggatattttcgcaaaagtctgtcagttgattcttggtgatggagggcaacagagaaaagtcgatagacaattcatctccctgtatcgataagtagtttgtaatgcaatcataaagagaaaagccggaagcatggggatgatgcaatgcttccatataatcgattaatttctttctacgctcaaataattgctttgaagtgctttcaaactcggctggagactgaatgtgaatgacttctatagccttctgaagctgagccagaaaatgagatttagtgaccttattagaatgtagttccagacagaacggatctaatcctatcttagtcagacggttttgtactacagaaagtgccgccatcttttctgctacaaacagcacacgttttcctttgtacagggcattggctatcatattggtaatggtctgtgatttaccggttcccggaggtccatgcaatatgaagctctttccttctcctgattcaataacggcttccaactgcgaagaatcgacatcaacaggaatggcaaaatggagaggttcaagatttttgtctatttctctggcattaatctccggagtcgtatcctgccattgaatacgattttccatcagactggctataatggcgttctctttcaatttgtctgcattggtatgaatatcgttccacatgacaaacttgttgaatgagaatagccccaacatcgattcttccactacatcccaacctttcatattacgaatgcaggtacgaatcgtagcgaatatctttttcacgtctacgccactatcatcttttggcaacggattcaacccggaaagattaacactgaactgttgtttcaatagttcgacgagcgttatgttcaatattatttcttcgtctctggtgcggatgatatatccgcttgaacctccacggcgcacaatgtctaccggtaacagtaagataggagcaaagcgtggtttcacgctcttaggagactcgtaccacttcaggattcctaaaacgaggaacagtgaattggcgccattttcttcgatggcggttcgcgatgtacggtatacaaatttgagtgagttctgaagttcgctttcggtcagataagaacgaagttttttgtttctcagctcgctgattactaattcttccaaattctctttccataaagaagaatcatagagacctgtctcacccggttctattttacttttagcgggactgggtaatatctggtagttttctccggcttgcaaatgatcttccagatggtcaatttcaaaagatatgaatggtataacccttctaccaagacggatgttaatcagattattgcgtagagaaaaatccagcagttttctttcccaaataatctgcttggttatttcatccttgctgtcctccagttttatttcataccggtccagtcggtgtattctttgggttacattctcatgttctattccgctgttttctatttgccattcaccgttatggtttatgcgttgtggcaatggacggattttatccagtctgcacctatatacatcgataaacagctcgaatctgttttcttctttgagttctctctgagccattgtagcagcttcttcaaatgaaatattttgagaagatgccagtgcggttgtctctactaatacaatgtcgctgatgccatttgcactccctttgagtagaaaggaagcatcatcgcctacggtttgatgataaatatcttctgtaagccatgcacctaccaatatatgtcctttcaacaagactaaaagaggatgaatgccattggcttccagacaggaagcatagagtaaagtcaggtctatacatgtacctagtttgctggtgagtacattatctaccaagcggatacgctgccccgaagtttcaaagctggctggaactgtagaatatattaaagactcagaccggagagcttcataaatagcagctacctgtgcacgtactcggttggggtcctgtgtctgatactcgtctaaggcagagtttccggtccacttttcgaggaattgtgaggcttttacgcttattcttgaaagtatgggatgattgggagtaacaaatgtagctaagagttcgggcataatcctggaaccggtccactgatcgtatgccatcagtttgatgggaaatgtttgctgatgggctatctcaccggaaatcgtaataaccagatgaaagatagtatcgatgccttctgtcaattcgattaattttccactttcaggtgatatttccaggttattgatttgaatgttctgtccgtgcggaatgacttcgagaatactctctgagtacttaattagttctccatctatcgaaactttgatattgttccaatcgacttcatcactgttcattagttcgcagaaattgcatgaaggtacatggttgtgtatcattgcataattgatgcatggcaggtattccaggtggattgttccattgaaggtgcctgtaattgtgttgtcgtttcccattgttgttatagaatttaactgataaaagaagtgatcccataatatcattcccggattcaaagttataaatataatgctaataatctatactttatttataatttagtgagatatttgtcgcctatttagttcaaaaaggattcaccctattgtccattgtgctgatttttgtgatatttgcaatgctttagaacaaaaaacactgttgaattgtttaataacagacaaattttatatctatatgtatattactctcattgttttattcctttctgcgatattctttatgagtggcaaagtgcgttcggatttggtggcgctttgtgctttggtgttactaattatattcggtattctaactccggaggaagcattgaccggtttctccaattccgtcgtgatcatgatgataggattgttcgttgtgggcggtgctatttttcagacgggtttggcgaagatgatcagtagtcgtatcctaaaattagccggtgacagcgaattaaagctttttattcttattgtactggtgactgccttcatcggcgcttttgtcagcaataccggaacggtagctttgatgcttcctattgttgtcagtatggctatggggacacagattaatgtcagtcgcctgctgatgccgcttgcatttgccagtagtatgggaggtatgatgacacttatcggtacaccaccgaaccttgtaattcaggaagcactgacttctgctggatatgcgccccttacttttttctcatttactcctgtcggactggtttgtgtagctgtcggattggtgatactgattccattgagcaaaattttcctgactaagaaaggcgataaggatcgtaagggtaaaaagaataagtcactgaaagagctggcaggagagtaccaactgttccagaacttatgtcgggtacgagtggagagtagatcccctttgactggaaagaccatacaggaactgggtattccacaacgttataatgtgggtataatggaggttcgccgtcagtcatcttcttcgcgtcgtcatttctttaagacgatgagtcaggaaatggctgctgctgataccattattcaggagaatgatattctgtatgtactgggagattttacgaatgtggagcgctttgcagaagaaaatacattgaagttactggatacgcatgatgcagaaggtaccgtagaatcaaagagtgatgaacttgaattcacagaaatcggtattgctgaaattgtattgatgcctgcttctaaccttgtcaataagccggtaaaggattctggtttcagagagaaatatggggtgaatattctgggtatccaacgcaaacgtcagtatatcctgaagaatttgaaggatgaaaagatgcattcgggagatgtgctgttggtgcaaggaacatgggagaatatagcgcgtttgagtgaagatccctctgattgggtagtactcggacaaccgcttgctgaggctgccaaagtaaccctgaatcataaagcacctgttgccgctattatcatgttgggaatggtggtaatgatgatgttcgatttcatccctgtcgctccggtaacggcagtaatgattgcaggtttgctgatggtgcttaccggctgtttccgaaatgtggaagcggcatataaaactattaactgggaaagtattgttctgattgccgctatgttgcctatgtcgctggcgctggaaaagaccggagcttccgaattggtgtcccaatcgctggtaaacgggctaggtagttatggaccttatgtgttattagcaggtatttatttcaccacttcgctgatgactatgtttatcagtaatacggctacggcagtacttcttgcaccgattgcgcttcagtctgccatacagttggatttgagtccgtatccattcctatttgccgtaaccgtggcagccagtatgtgttttgcttctccgttctcgactccgcccaatgcattggtgatgcctgcaggacgttatacattcatggattatgttaaagtaggtttgcctttacagataattatgggaattgtgatgatctttgtgctcccgttattgttcccgttttaaaataactaaagtataagatcgatgaaagtagtaaagagtttgatttttatcttgtttgccctttgtagtttatcgggcaaagcacaggaagtagctgccgatagcaccggctacattgtaagagtaggggagatggctcctaactttaccattaccctgacagacggtaagaaagttaccctttccgaacttcgtggaaaggtagtgatgttgcagttcactgctagttggtgtggggtatgccgtaaagagatgcctttcatagaaaaagatatctggctgaaacacaaagataattcagcatttgctcttattggtatagaccgtgatgagccgttggacaaagtgattgcattcggcaaatcaaccggtgtcacttatcctttgggattagatcccggtgcagatatctttgccaaatatgcgcttcgtaatgccggcattacccgcaatgtactgattgataaagacggacgcattgtgatgctgacccgcttgtacaatgagaaggaatttgctgcattaacgaagaagatagacgaaatgctggcaaagaaataataaacagaaagtccgggttggccttatttcaaggtcaacttggctaaataatcgtagtgctttccctcttttaccaactccgcttggaaaccattttcggctgcataaagactgagtgtctggaaatcaatgtaaagccagtcgaatgactctcccagaatatccttatattgcatctggaagtctatttctccataatagtcacctgccagatcgatcacaaaacttccgtcttcttcctcaaacagatagcgcagatcactggagtccataaagatgcagccgctgggttgtagcagttgcttcattcttttgaagaaggcaggcaggttctccaacttaccgatgattccagaaccgttcatcaacattaatattgtgtcgtatgtctcttggaaatgttcatcgaacagattgagtaatgtggcatgccgtacaccgcgttgttgcattacttctactgaaagcggtgaaatatcaatggcatgtacatctttgcctgcttcctgcaaggcaagactatgacaaccgcttccggctcccacatccagaatctttcccgtagccagttgcagagcggtacgttccagaagaggcatctgcttttccatgcgaaaaagttcctttaccggaatttcatcctcatcgaactgtgaggagaaaacccgtagtcgttcggccttgtgtcgtttataataatctgcaatagcagtacccatcggatccttgtcaacagaaagcagcgtagtgttcattctattcaatctttaaaagttgtccgcaaagatacgaaaaatgcagtctgttagtagaaaaaagctatctttgtggtcaatatatggataaagccatacttcgcactggcttataaatgtaatagtaatagaaaccgaatatgagtatagaagatgcaataatgggcggtatcgtctttagaggaaagaaagacaaacctaaggaagatggaaaggtgaaaactaaagccaagaagaaatcgtatattaccgggaaacatggttccggtgctgccaagatgaaggcggatatacgaaagaaaagggcaggtcgtcataaataagatgataagatggtaaaatgataaatggtaagatgaggaaatgtaatcctatcatcttaccatttatcattttaccattctttcatcattttgccggaagcacctctatccagtaatcatccggatcatggatgaagtacaatcccatagttgtattttcaaagcatacccaacccatttctttatggtattggtgaatagcttcataatcaccggcaacacggaagcataaatggctttcgttctctccaagttcataagcttgcggatgatctttcagacaagtcagttccaagaggaaacctgtgctgttatctgtcaggtaaaccaatgtgaaggagccatttgaggcttctttacgatgatgttctttcaatcctaatgccttttcatagaaagcaatactacgttccagattggtaacgttgatattaaaatgatcgaatttagcttttatttccacgtaattagtgattagtaattagtaattatttaacgaatgctttcagaatttcacccacatacatgcgtggctgaccttccatcggagtctgtgaaggcatcttcttacattccaaaacaactgacggttcggtttggtttgccggatagaaacgaacggtgtaagtttctgccgtctccatctgttcgtaaggctggtcgggagaaaggaagctgaaaataacaggcttgcctgatgatttgcccaatgaaccacctgcgtttgctgtcatcatggtcatgttgaaagcatccgagccgattacaagcactaacttgcccgcacccatttggatggcatttgccggcaattgatccggagctacttctttgtaaccgggcactgtacctgacgttgcaggagtagccggggtgagcggagtggcggggattactgtgactttgccggtttcagccggagtcttcacttcaacttctgcttttggggcaattactatcggaccagagtttacaacactcttttcctctttcttagcttccttttgctcagctgcttcggctgctttcttagcagtgcttgcactgagggcttcggctgctccaagggccaggtcgtctacaaagtctactgtttttctacgccatttggcaagtccgcgcaccaatttggttttggccttgttcagtgcgtacttgtctactatccattcttctgccgtatatttctctttgccttcgcgatagttgaaacggattttctctacttccatcgtacacttctcaggtgcgcagacaactgaaagctgatagagtatctttgtacggtccagagaaagcgcactcgaactgaatacgatccattcgtctcccgtgcctacgatttgtccttcttccggattggtgtagactacgcgactggtgtttgcgtttttcttcagccgcgcttccatccaagcctgtatgcgtttgaagatttcttcctgcgacatgccgggaatgctgaattctttggtgaataccacttttccatctacttcgggtactgcacctgccagatacttgctgtcgtcatctttatctttattggcgtctgcaaacgctgtggccggcagacagatgcataacagcataaaaagaaactgtgtcaaatttttcataatgcgtatgttttattgagtaatatcgaaactttcgcccctgcgggtaatggacaggaaacggcaacctttgctttcggcaaactcccggaaagcatttccgcccttgtattcctcgctgaagtgcataggaacaaagatagcggtttttattcgttccacgaattgttccgcacctctcatatagtctttcccgatgcggttgtccactggaaacatggctacgtctaccgaaggggcggtctgctggaggtacttcacctcggcaaggaagtcgccttccgcttttcggatttcctgtggggtggactcttcactccaatgccagttattcaggtctccggcatggaacagccggatgccttgcaggtcgatcagaaaagagatgcccacgtccgtggagccgaatgcttcgatacggatattcgggtcttcgtacacatcacctttatttatataggtggcatcctcacgtgtggcgcgacgatgtttcaggatgtccttggagaagatgtagtgaatatccggacgctcggccttccataaaagaacttcgcgattaaagtggtcggggtgaaaatgggaagagagtacatatagttctccgggtcttcccaacagatagtcatgaacgatacctttattatattccgtttctgaggaatctttgtagtaatcgataatgactgtcactccgtccgcttcaatcgcgaagccgctatggtaaatgtaatcaagtttcatgcaaggatcaatttatagcgcaatattacgaaaaacgctacacaaaccttggcttttagctgttatttttatctaaaagacttacatgggtacttccatcaacaagatatgcgagtcttccagtgtttccagctcaaagctgtgagtgtcatatacacccatgccgtcacggcgtgagagtacagtgtcgtccaccttcacttcaccttcgatcacgaagatgtacacccctgcatgcgactggtgcatgtggtagccgatttttttgcctgcttctatctctccgatggagaaccatgcctgttgcagcatcttggcaggagcgtcaccgtccggtgaaacaatcaacgtcagttcgttcttgcgcagcaacgggcggatgtcataatcctgataggcaggtggtgtattcagcttctccggcattacccagatttgtaggaactctaccggttcggtgtcgctgccgttcatttcgctgtgataaataccggtaccggcactcatggtctgtatgtcacccggcgtgatggatcggctgttcttctggctatcaccatgtttcagctttcctttcaaggggatggagataatttccatgtttttatgcgggtgggtgccgaagcctttacctggttctacacggtcgtcgttcagtacgcgcagggcaccgaagttcatacggcgcgggttgtagtaggtgtcgaaactgaatgtatggtgactgtcgagccaatcatatagagcacgtccacggctttccgctttgtctattacttttttcataattaattcctttcttttaaatggttgatatgtttagataacaaactggttttgaaaaagtttatggtcagatgttatcctctgcttattgcagattcttattgttaattttatatcttgacttcattttccaaagcttttccgcttgcaaagtctttgatattctgaagtgtggtagtggcgatattctccaatgcttcacgggtgaagaacgcctggtgtgaggtgacgatgacattgttgaaggaaagcagacgcgccagtacatcatcatcgatgatgcggtccgactggtcttcgtagaagtattcgccttcttcctcgtacacatccagtccggcagaaccgatcttcttgttcttcaatccttctatcagtgcgttggtatgaatcagttgtccgcgtccggtattgataatcattacgccctctttcatcttgctgatggagtagtcgttaatgagatatttggtctgctcggtgagaggacagtgcagggaaatgatgtctgaactgtggtaaagttcgtccagtgtggtgtacactacttggtgctcacgggcaaagttatagtcggggtataggtcataagccagtacgttcatgccgaagccgcgcagaatcataataagtttcttggcaatctttcccgtaccgatgatgccgaccgtcttgccgtacatatcgaaaccaagcagtccgtgcagagagaaattaccgtctcgtgtacgccaggtggcacgggggattttccggttcagcgacagcatgagggccacggtatattctgctacggcatagggcgagtaggcgggtacacgtaccactgtgataccacaatcggcagccgctttcaggtctacattgttatatccggcacaacgcaatgccaataatttcacgccattgtccgccatcatatggagcacttccgcatctgcggtgtcatttacaaatatgcagacggcatctacattttgtgttagtatcacgttgtgtttattcagatgacctttgtaatagcggagttcaaaaccgtattctttgttcttatcattgaacgaagcctcgtcatagggcttcgtgccgaaaaaagcaattgtatatgccatagtttatggagtttttagaatttatcgtctgtcaatataacacacgcgtggctaataaggttcattggcgacagttgactacgatattgtggatagttgttggtgactgcggattatctcagtttggtgagtcttgttcataacgctgcagaaaggaaataatttatcatttcaaatagtttatttgttttgattttttgatatcgaagaagcgttttgtaaatggctgattatcagatgtattacgatgatggtatctcagtatacgactgaggtagcctaagtatcatattgaggtaccctaagtatcatattgaggtaccctaagtatcatactgagataccctaagtatatgactgatcgcacaattattctgttgtgtaaatatttatcataaacgcatgaaatgtttatcatacagggtcatcgttttgcccataacggacgggttatgaatataattttaggcgcggattacgcggattacacggattaatggctgcgctatcacactatattacaggaaaagaatccgtgtaatccgcgtaatccgcgcctaaatcattatcagcattagttcattacttttcccttatgagcaacggatatcatccatcttttttttatcagtttcattagaaacagtttctattttcaattaattattggtctgatgcgacatttttgcacaaaatgctttcagccgtgcaatattattgtaactttgcgcccgctaacaattaaaaaagatttagatgagaaaattttcgttgattagccttatgttgctaatcgtttcaacttcaacttttgctggaggtctccttacgaatacaaatcagcatgctgcttttcttcgtatgctatcccgtggcgctacaactgaaatagacggtgctttgtccaatccggcaggtctggcgtttttaccgactgacggctttcatatgtctttgagtattcagagtgcttttcaaacaagaaatatcgatgcttcgtgcgaaggtttggggctgaataagtattatgagggtaaggcatctgctcctgtcattcccagtttgtttgccgcttataagacgggtgactggacgctttccggcttcttcggcatcaccggtggcggtggaaaggcttcgtttgatgatggtcttcccatgttcgatgctatggtgataggcggattgggagctcaaaagattccgagcaatgcctattcgctgaaaagctacatggatggcaagcagtacatttactctgtacagttgggcttgacttataaggcaacagactggctttctgtttttgcaggtggtcgcatgaactatttcaccggtggctatcagggtgcattaaatgccagtgccgccactaatttgcctttgcctaccggaggaacgataactaccggaacagaacttatcggcatcgatttggattgcagccagaccggatggggatttactccggttatcggtttggatgccaagttgggcaagctgaacattggcgcaaagtatgagttcatgactaatttgaatattgagaattccactaaagaaaactcgcttcgtatgattggtgccgctgaaagtgaattggcggattacaagcatggtgtgaatactccgaatgatatcccttccatgctatccgtggctgttgcctatgagttcataccggtattgcgcgcatctgtggaatatcacttctttgatgacaagaatgcaggaatggccaatggcaagcagaagtttctgacaaagggaacaaacgagtatctggcaggtattgagtgggatgtaaccaaacagctgacagtgagctgtggtggtcagattacagattacggattgtctaacgattatcagagtgataccagtttctcttgtgattcttatactctgggctttggagccaagttgaagttaagtgaaagagctgccttgaacgttggttatatgtggactacctatgatgactatactaaagtgtctcaaaactataatggtaccggattgagtggtacaaatgtttatagtcgtactaataaggtgttcggccttagtattgattacaggttctgatttcataattacttctaatatgatagaagaagccgtctcgaacattgttttgaggcggcttccctgtttatatatctgattagaaagaatattgtaccaacaaattcattcggttggcatggtgtgttgaattactgaaatctgtacgccagccacggaggtattcggctcctacctgcatgtttggagtgacattccagaatacattggctacgagatattgtccgtagcgataactgcttggttgatcgttgggataaccattctcagaatataatctggacatactgtatgtgccggatacgaatattttcggacagatattatactgtgccccggcaaaccagcccagcataggcaatgcctgcatcttgccttctttttcaggattgggaacgatgtccacattcagattgcttatatcattcaaatattgtccgataccttttccgtaagtagcttgcccgaagatttcccatttcttactgagattgaacgaagtagatgcctgtacaccccatccggtaacatcggacgcatgattgctgagcgtgctggtatacgtcatgctgcgcacgataccacccacacgaagatggctgttagctccccatccatattgggcgtaagcggtgaagtccggcatacgttgttgggctacgctgagttcgtcattcgtggcgccatctacgcttggcacttcgatagatgcatggaaacgccagtttttcagacctttgtaagtgtaggcaagttgagtggcacggtagaaagttgcaccattggggccttggaagtcgatagtggaaggcaatgcagccaaatccatgaacccaccataagtataacccaccgttacattacggaacgacatataagcatttcgcaactggaataccttatctccgccacggaagttaccggcagtatatacaacgaaatcgcccagcaatttagtatgccctaccagtttcaagaagatggtggaagtacttgcatccatttggaactggttctttactttgctggcattcggaatgtaggcagggatgaagtccatgttgtccacgatgccgccaaagtcatattcggcggtggcacgcacatatccgccgataccaagggcgaatttcccttttttatccatcaacaggaagcgtggagctttaggatcgtggatgtacctgaattgtgattcgttcatgatacggacgatctcgtcgcctgccttgtcgatggtaaccatgacgatgccgttaggtgcttcgtcatcaataatcactttttcttgtgctttggctatggacggaatgaaaccgatgccgcacaatagaaacattacttttaagattgtcttcattattaagttaggttttggtgaatgccctttgaacaacttaaattagaaatggttttgcggtcaatggaagaaaatgtatctttgcagccgatttaacgatcttatgatgccgtgaatagcggtcgtgtattctagaacaccacgtaaaaaacaggatttatgaagcaaaaagtatctgtaccctttatgctgctgggtattctatttaatgtttgtctgattgcagctaatcttcttgaaactaaagttatccaggttttcggtattaccgttaccgcagggttgctggttttccctatttcttatattatcaatgattgcattgctgaggtgtggggctttcgtaaagcacgtctcattatctggagtggttttgctatgaatttctttgtggtgatgcttggattgatagccgtagcattaccggctgcaccattttgggagggggaggctcatttcaactttgtttttgggatggcaccgcgtattgtggcggcgagtctgacagcttttctggttggttcgtttctcaacgcttatgtcatgagccgcatgaaagtggcaagtggtggacggcatttctctgcccgtgccatctggtccactgtagtgggggagacggcagactctctaatattctttcctgttgcttttggaggaattattgcctggcctgaattactggtgatgatgtgtattcagattgtattgaaatccctctatgaggtgttgattcttccggtcactatccgtgttgtagcagctattaaacgcattgacggtagtgatgtatatgatcaggatatctcttacaatatattgaaaatcaaagatatttgaagtaatgataaatactgtaaatcaggagttaagcgaagcgataacttcctttaactcctgattcgctttaataatgaatagttgtgaataaagaagttgcattagtcgtgttcagtggtggacaagattctaccacttgcctgttttgggcaaaacgtgagtttaagagagtagttgctttgagcttcctgtacggacagaagcatgagaaagaggtggaactggcacgggaaatagcccgtaaagctgatgtggagtttgaagcaatggatgtgtcttttatcggtaagttggggcacaactcactgacggatacaacgatgcttatggatcaggaaaagccggccggtagttatcccaatacatttgtgccgggacgtaacctcttctttctaagcattgctgctgtatatgcccgtgaacatggtatcaatcatatcgtgacaggagtgtcgcagactgatttcagcggataccctgattgtcgggacgcctttatcaagtcgctcaatgttacattgaacctggctatggacgagcagttcgtaattcatactccattgatgtggatcgacaaagcggaaacctgggaattagcagatgaactgggagtgctcgatctgatacggaacgaaacgttgacttgttataatgggattcagggtgatggctgcgggcattgtccggcatgtaagttacgtcgtgagggattagagaaatatttaaagcagttaagtatttaaaggaattatcgcttcgcttaactcctgatttacattaaaaacaaatagttatgaccgaattaaaagatcaactgtcccttttggggagaaaaacagaatataagcaggactatgctcctgaagtgctggaagcttttgataataagcatcccgagaatgattattgggtacgttttaattgtccggaatttaccagcctatgtcctataaccgggcagccggactttgcggaaatccgtattagttatattcctgatataaagatggtggaaagtaaaagcttgaaactttatctgtttagtttccgtaatcatggcgcttttcatgaagactgtgtgaacattataatgaaggatcttattcacctgatgaatcctaaatatattgaggtaacaggactttttactccgcgtggtggcatatccatttatccttatgctaactatggacgtccgggtacgaagtatgagggcatagctgaacaacgattaatgaatagagaataaaaagagataggggtgatttttcggaacaccccttatttatatgaatatcacttcttgattattaccagttcggtagctttcaggatttccccaccttcaatcttttctttgatacatgttacttctacactgtcctccagtaatacaccgggaactttatccggattggcatccatagtgctgatgtttattgtatcaccttttcccgtaatcagggtgatattattcattgtagcatcgtaaacgattccattgactatttgaggacgattctcttgtttacaagaactgatacttcccacaaggaaagcaagaacgaagagataaattaactttttcatatataatagcttttcgtgataattgttgaatgcaaatatatgattatttctaagaaaatattgataatcacagggaaagtctttcttttcatgaactaaatgctgcttttctgtgttttaatacagtcaagttatgcaatcatgagaatactacatattagatatcttttacttattttccttttatctttctcagctctggcgtctgccgatgataagaaagagaattctggtaccgatttgctgattatcagtagttatgtatcgggtgccccatggagtcagactatcatttcacacatcatgcagaaagagtatgaccggaaggatgtgagtatgaatgtggagtacatgaatatcctgacgatagaaactcctgagatactgaaccaatataaagaaaatcttttttcaacttatgataacaacccgcctaaagcagtgttgatgttgggaaatgctcctttgatattacgtgatgatatgcgtagacactggggagatattcctttgatcgtatgtgccgaaagcagatatataggaccggattccacctatatgtataatcaggttgttccacaaaaagatcgcatttacctgaatgatttgcgtaaagagtataatatgacctttctgggggcgcgcgcttttattcccgaaagtgttcagttgatgcgtcgcatgattccgaagatgaagagtttactgttaattggtgaccagactgaccgtgacattgattatgaccagcaactctcagagttgattaacactgaatatacagatattaattataagtttttatcggcaggtgcttggagtccggaccagttgttggatacattgcgacaagtggttccggaggaaaccggtattttgttcgcttcatggttccacaaacgaatgtttgcgggcaatatgcttatgatggcaaactcttataaggtgattgccaattctacattgccttgtccgttttttgcattatcttcttctatttcaagtattgaagaagatgggactataataggagggtgtgtatatgatatgaacctgtactgtgaggaaattgtgaagatgattaatgccgtagctgatggaaaacaggcacgggatatcccgtattatgatccgaagcctatggttcttttcaactatccttatatggtcgattttggcttgtctcctaaaaattgccctccgggaaccatttacttgaatgctcctcctactttctttgaaaaatatcggtctgccttggtagtaggaagtattgttttattgttggttgttctctttttccaacttcggcgaaataagattttggaacaacttcagttggttgaacagaatcagcgcttcactcactccaaaatggctatggcattggaggttgttgatttactaccctggcaatgggatttacggacggatgaaatcacatatagttcttacaaaccaatagaacagggtaaaaaagaagtttcggaaatgacctatacgactgatattaacgactatctaacttttgtttgtgaagaagatagagaacgtatccgacaggtttttaaggatgtacgcgctaataaagttgatagaataaaggaagaatatcgcgtccatcgtccaggtaaaccatatgattcggaagactggatggaagcacgtgcttttgttgaacaatatgatgaaaagggaaaccccttgatcgtggtgggatcatcattgtttattacagaacgtaaaatagcagaacgcgaactgattgctgccaaagagcgtgcggaagaatccaaccgtctgaaatctgcctttcttgctaatatcagtcatgaaatccgcactccgttgaatgcaattattggcttctccagtatattggctatgactgaagatgaagaagagaagaaggagtatgtcagcatcatagagaagaataatggaatcttgctgcaacttatcaatgatgttctggatttatccaagattgaggctggagttcttgatttgtattattcggaatttggattaaatggagtgttagcgactttgaagggagttgttgagtctcgtttgcaggatggggttgatctgatttttgagccggggatgccggatgattatgttgtttattcagagaaaaacagacttcaacaattggttttgaacttcctgactaatgcttgtaaatttacatcgaccggcagcattcgctatggctatgaagtgcgtgacaaagacatctattattatgtaactgatacgggaactggtattccggaagataaactccatcttatattcgaacgtttcattaagttggatagttttaaacagggcaccggtttaggtttgcctatttgccagctcattattcagaatatgggaggcgaaatcggagtgaattctaaattgggagaaggttctacattttggtttacgcttcccctcaaaccaaaacagtaagaggggataacgttgcttctatatgacagctttattttcaattaagttcttcaatcgaaccaaggcttcgatataataatagtctgcataaatgatggcggcatctatttctgaattattcggcaagtgtccggtggagtggaggaggaatgccggcttgcttttaccgcattgatacttgtccgaactcaggcttgccaacatttttatagctgcattcttatattcttctccttttttgccaggcaggtaagtggagagttccagtaaagccgatgcggttacacttgcagcggaggcatcacgtgggacattcgggatattggggtcatcaaaatcccagtaaggcacatagtcttccggcaatctttctaaatatacatctgttactttctgtacaaaatccagatatcgtggatctaatgtttccctgtagactactgtatatccatagatagcccacgcctgtccgcgtgcccacatggtattgtctgcatatccctgatgtgtaactccttttatgaagtcgcccgtcaaagtatcatagacagcgacatgataggaagtgtagtcgggacggaactgatatttcatagtcttatcggcgtgcgatacggctatatctgccagatatggatttcctccgttcttggcagcccagaaaagcatttccaggtttatcatattatccatgatcgtattgtgtccaccgaacatttctatattgcgtggccatgaaagtatggtacctacacgaggtctgaacaaagttgccagtgaatctgctgtatccagaatcacttgtttgtattccggattatgtgtcaaccgatatccattgccgtagctgcaaaagatcagaaaacccagatcatggtcgtatgccggaatttgtgacaggaacttcaacggttcggtgaatttctctgcttcttcctttatggttgctttaccggtatattcgtaatcataccataaaactcctggccagaacccactgcaccattcatcctttgttgcttttcggcaatgccaggtgttgaggctgtccatgatgttacggggcatcatcgagtagtcgatagtaccttctgccgcttttagttctgttaaagtgcgttgtacctgggcgtcacagtaatccagcgcctcatatacatccacatccattcctttctcgggcatgttgcaagctgtaaacatgcacaagcatgcaccgaacagtagttcttttgttttcatataatcagtctttttatttatctatgtgaaaccagtcggcatctacccatccccgttccttaccataaggagtggtactgaataatcctactttggcacctatccattttccctggcgggccgtgaaaggcatacctattgctttatatttcttaccatccaggctgtaatagaagtggcagataccgcctttctctatttttacccgtagatagatatctctttcgtagttgggaaacaaacctgcttcgtactttctgctggcaggtaattctgccaggcgagtgactgtttcgggtatcttttgctctgcatccttgcaagtcacttgtttcaatataaacttatcgccctctttctctactccgaggtaacaatagtcccagcccattacaatcaatccggattgctgtccgtccattttggcggaaacttttagtttggtagttgctgtgaactcttctgccatgaatttctgcaataaaaggttcggtacttcccagaaattcacaaaattttcggagagaatatgtccgtaaatacggatgaatcccaagtcggaagtatatccgaatgtatcctgataattggcatgccattcccattgtagtcctaactgacgggtattgaactcgtcactgtccgcaggtgtttctactgggtaattcttgcctacattgggctttttataacgggttacgggttcgccacaaccatcgccgtccttatcttctccaattacaggccagtcgtttacccacttcatcgggttcagatgaacgacacgcccatacatggctttatcctgaaagtgaacgaaccaggattcctctgtttgcgtatcaacccatgcgccttggtggggaccattgatgtcggtagagccttgcgccatgacaatcttcttctcataaggaccgtatatattctgcgaacgcaatactaactgccatccggttgctactccgcctgccggagcaaaaatatagtagtaaccatttcgcttatagagtttgggaccttcaattgtatggttgattccatcattaccatcaaagaccagtaccggatcactgattacttttgttccttctgcattcatctcacaaattgtgataacactgttcagtgcggcacgacttcctgcccatgcgtgtaccagatatacttttccatcttcatcccatagtggagcagggtctatcatgccacggccggcttttaccaatatcggtttctcccattctccagccgggtctttggtctttaccatgaagatgccatgatccggatctccccaatagatataaaactctccattatgatggcggatggatggtgcccaaacaccttttccatgctggggagcattgaagaactcgatgggttctatctgtttcaacgcatagcctacatatttccagttaaccagatctttggaatggagaatgggcaaaccgggagcacatccgaagctggaagccgtcatatagaaatcttcacctgccgcgcagacatccggatcggaataatcggcatgcagcaccggattgatgtatgtgccatccttctggtcagatacccaggctttggatacatattgggcttccgcctgccaacaggcagcgtatagcaatgtagtaagcagaaatatctttttcatctttttagttacctttttaaatatcctgaaaacaacgattttacctaagcaaactcttacctttatctactgaaaataatcttaatgtgttatttgcctattaatacgagcgaatctgtttattcactcaatgaaatatcatattttataatctttctcctttgtactttttatacttcctcatttcctgcctgtctataggtaccagtcttatggcagctccaccactgggtttcagctggaacttcatagtttgtgaagcgttgacaagcagataagtacattttacctgtgtacttgtttttatcttttctcccccatccgtatagatgcaggcgaggtaattcttttctttatcgaggaacgtgagaggtatttcttcttcagaaccttcattgttggtcattgctgcaacaaaccattcttggccttttcggcgtgccattgttatgtttttgccgggagtgccatccaatactttcgtatcgtcgaatacagtttgcaagtgctcaaaccattccatttccggttctccgtgatagaacgatggtttgtcataccagaagatagtttgcagagggctgtagaaaacgagggatgctgccagttgatgagcatgagtcgttttcagccgtttgtcgaaataacagatcgtatagtcggctgcaccgtttatcatacgagtgaaggggagcgtgacattatgagttgcatcgggaaattcttcgtttccacaaatgccttcctgagttaataaattcggataagtacggctgaagcctgaagggcgatattcatcatgtatattcatcagcagatgattctctgctgccaagcgaaccatgtcgtgcatccaagttgcccagcgatggctggcgtattgtacgaaaccggattttactccgacaatcccccattcgcggagcaatgggaaaagttcacgcatttgcttcatgagtgcatgctggtttacgtacacccagataccaactcctttttccttaccataagctataacacggggcatatccagtttggcaaccacttttgtggcatccccgtcatgtgaagtacagggcatataccattgccagtcgaaaagcatatacgggatattatgtgctgcacagaagtcgatggttgcaatagctccttcggttgtgatagttgtttcgcgcataatcttgcctggttttacccatgcggcggcatcggcaatttcacacggcggattcagattctggatgatatcattgtgttccagcaattcacccggtttgtcggctgccatgactatcttccagggagtggcataataagtcactacatccacggggctatacattacagaagtcagtgtattcttcttgtctgtggaggcaaggtatttggtcagacaccagtcgtctacatcagcatctgccaatgcggcccatttgccattcgggagttccagcgtgagggcacgttctaccggatgtttgatatcatcaatgttcaggtactcaaagaaagcctgtgcccattgttcggtccatgcttttgtacctgccggtaaggcgtattctgtgagatcacctactactttatgaaagatagcctttgggtgttctgggaagaaatagcggaaagctactccttcattataggcacgcacctcaatgttgagtcggtagccggagttatctttcttggagagataaagggtgccggtccggtaatgatcgcgtacactgctacgttcaccgtaaagtggctgccaggtgatgtctgtttcgggttggtaagtcacagagtccacttccagattgtccatccagcaggcaggctgtttcaggtttcgtgctcccagagccatttcccatatccggttgtccagttccagcccggcacgtgattcattgactacaggttgtgatttgtaatctacccgataacaaagttcgtttgccgcaggtgaaacctgcttctggtaaaatgctatttcatgtgttccgtcaggagatgtcagcttcagttccttgccattgtctgcaaagagggaaggagtgagaactaacataataattgctgagccgatagtcttcatatcttcgtatttattgtttttatataaatacgatttgggatatgaggatactcaatgtattctatctttttagggaaataatgttcgagacagtttgtgaaatgacaggacttccaaaaaatgacgagaagccatcttccttttgtgaacttccctgtacatgggctatgaagaatccatatacccggtcctgtttattgatccatggataggcgccggcccaacccggtgaactgatctgataggcttctcctgttgcttcatcaataagttcccgccattctcccaaaccatatatgccagtatgatattttttcagcgcacgttccacatattcacccggatgaacttctgcatttcccacttggtttgcttgcatttcatgtatggtttcgggtttcagtagttgcttttcttcaaatacgccattgtggtagatcatatcaagaaaacacatgtagtcgtgcaaagtggtacagagacctccacccaacatgggagcgtgtcctccatctgtattcacgggcgtgaaatgggaatttttcattcctaaaggtcgggctattaattcctgaaataattcctcgaattctttattcatagctttttctgccatccggccggctatctgcatggcaagtccgccatattcaaagcgggtgccgggagtgaaaaccgtgtcaagcggaagaatctccatgattgccgaatccagatgattgtaattgtctacgcgtggttccggcagataagggcggacacccgatgtgtgcgaaagcaactgacgtaaagtaatcattccttttatgtcgtttttaaattcaggaatccatttctttacactgtcattccagtccagttcggtgcagtctaccacagctccgattactgcggcggctacccattttccggcagaggctacatagactttagtgtcaggggtaacgtctttgtagtttttctgaaagataacgctatcgtctctgactacacagattgaggctcccggatagtatcctttattcatccatgaggtgataatggagtcaagtggtgtaaaatcataatccgcctgccggttatcggcaggacggcatgatgtgaatgacagataaatacctatgagagaaactataataataatttgtttcatttttacttttctattaaatcccagtatacaacgtaacgttggtgatgtaagtcatacagtggctttaaaacattgccctgtgatgttttaaatatcagttcctcgcctgtacgctgtaaactgtgtccggggtgtttccggtctatttgtaaggtggtattcagctcagccggaatatgataattgtaagtatagtaatcattatataatgccggatcagagaatggtgccggagattgcataccttctgttcccgattcaccggccaataccagcggtccgtatagcagggcccccttttgtggattgtctggcgttgtttccaattgcaggctcatcggataattagcttcaatgcgatcaccgtctttccattggcgggttacggcaatgtatgatcccggtttctgttttaccgatactttttttccattgacgtttactttcacatttttactccatgatggatagcgcagataaatcgtagtggtgacaggtttgtccgtttggatggtcaatgcagtgttctcttctgcggggaaagctgtttcctggtgcagagttattcctttcgctttccagtttacttctgacgggataaagaggtttacgtagattccctggtcattgtgataatagatagcttctccatatttagcatggttttcgaaaccactgcctacacaacaccagaaggaattctcccgggtactataaactttgtgagagccggagagcaaaggcaagaaataggataccattcctgtttcaggatcttgttgcccaaggatatgattatagagtgcacgttcgtagtagtcagcaactttggcatctcctgtccagcaaaacaggtggcgactgagtttcagcatattgtacgtacaacaagtctcaccggtatatccggtcagatgtttggataattgttgtggatcgaaataatgctctttatcactgctgcatcccggtgcaaaggtatgatggtctatcatggtatgccagaaaaaatcagtcagcttccgactgtcattatcctgcgtcagctcgtagttacgtgcttcggcaagaacttttgggataaaggtattcgtgtgcttggttcctaaatcatcgcgttgttctttcagcggatcgataacatcattgtgatagaaaaattcagcaagccattgataacgctcgtcaccggtgatggcataaagattatagaaagattcgttcacaccgccgaattcattccgtatcatccttttccgggtgggttcatccagcggtttaagtttattataagcccagtcgcccatgcgggtaactacttccaatgcctgtttgttatctgtatagaggtattggtcgatcaatccggagaagagcttgtgtaatgtataccagggtgcccatacacttgtcccacgtatgttccgattgatcaattcttccggatatgcactgagatacccgtttcccaaagctgcctgtacttctgccagacctgtaacaagactgtcacctttcagcttgaatatttcacttccggtagatgcgtacatgagcgcataggctgatagtaaatgccctgttgtatgtccgcgcagttcgcagtccagtgattcccagccgcctagtttctttacggtcatatatccaccttcacgtccggcaaatactccggcgttgttgcggaaactgtgtagcaaacgattggttgctatagaagtcatccaaacagaatcacgcatcatattgtcgcgaaaacggcttggtaataaacgcacgtcttttaagtcgaaactctctacctgtatcggcgctgttgtcacttttttcatttttccggcatgttgtccgggataaatggattgagcggaaaggccggttgatagagccgcacagattgtcattaggattaaactcttatttctcataacttttttattaattctttctttatatatacgaagtagagggatatattactcaaaacccgttagaggaatttaaaactgtatagcgagctattttcctattacgactgaggatagttcccactaggactgaaggtatttcccactaggactgaaggcacttcccactaggactgaactcgtgttccactacgactgatcttagtggaacaccaagtgcgttgtcacacagatagttatgctttttgctgcactcctatatagctcatatcgggaaaggaatgaataagattcaccacagattacacagattcacacagatttatcaatctaataatcagcaaaatagaatctgtgtcaatctgtgtaatctgtggtgaattaattcataaccctgtagaaatgaactagtcttgtccgcggattattttatattactcaaatatcttccagcttttcaaatgagcgaatccattccacaattaccggttcattaccgatattcccaaaattgagaataagagtaatgtttgttggtctttctgtgaagtgcgttccattatttgacagatagtctgtaatcttgaatacatagatatcttttcctatctttttagccttatccgaatctaacttccaaaattccggagcactggcaacgctatagcttaattgtaaccagtctttatttgcggatgttggaattttgggtgcctttacagcaatatacggatagtttcctgcctggtaggaaatccttttcttttgcatatttactccggatgatacaaatgacattagattatccacctgtttataagagcaattggcgaaagtccatccttccagttgggaaagatcctcatttatttgtccggggattttcctttcatttaagtcttttcccaaatagaacagcaggctgccgaagcccgggttatcacaagtaaatcccggtccttcaggacgtatcatgcctaatacaatttgggtatatggcatttctaaccctttgcgttcaacatagtggttgtaggctatttcaaataatgagcggaaacgtcccattccttcttcccctaacgtagtccagtttgaatattttccggttatatctttccaggtaaagaaaggtacttcatagcccagattggatttggccaagtattcataacctttcataaggcgattatccaaagcgctatacaggtctctgccttgtgtccaggctatttcggcaatttccgagaggcatcctaaccctaacatggcatgttgctggtcacgtccactttcctgtatctggccggattctgctacgtagttgggaagagttccattatcatggcctttcagaaaaaactctatagcgtcttcatacaacttcttatcgttcagaaatattccgaatgccatttgtgccttagttaccgcaattccccagttaccgttggtgtaaggtttggtattgtagaaagtagtaagtattggctggaatacatctcggaacatactttctactttgggtgtatcttttgcatcccatccgttagtatatttatctgctgtatatgtatatctcatgatttctgctgcgtttaccagcataaatccttgaaggccggcacaaagcggatcgtccggaccttctattttctttagggtacttgcatacgctctgataatctccattgctttgtctgcatgaggctcttttcctgtgactatccaaagaatggcattgtagtaagctgcattaaaatctcgttcacaaggatctttggtataaccatatctgccggcacggctgatagtttcgaaaggtccttttatgcaataatcaacttttccctcaggcattcctcgcatgatgttaaatgaaccgtaagccggttggatctcatttctgacaagttcccggattctttttaatgaagattcagaatggagtaagcccggatgagtaaactcttggctgtttatattcagcatataaaagagaagaataaataacggaataaatttctttttcatcatattcttaaaataataaggttaatacatattagatagaagtcaatatgtatatagcgtatttacgtgccgatttacctaaagcgacatcgcactttttagtttaattatgaaaaacaattctgcgtataatgcatcatgagattaaactaagttttagtgagcaaaactatacattctatcaaaaaaatcattaagtttgtcggacttcttagtaataataaggagaaaatgatcgatttttatgaatgtatgaaggacacatattattatatagggagagttgctccatttgtcattcgttatttatttatggtgataatgttgttgttgccattatctctgtattcaatccaacagtctcctgtttttcgttctgtaactgtatctgaaggtttatcccataatacgataaatgctatatataaggatacccgtggtttcgtatggttaggaacacagatgggattggatcgttttgatggggtaaatgtgacgacttatcctcaattttccgggagaactgttttttcgatagcagagactgattctgtaaatttatgggtgggtacagatataggattgataaagtttaatcgtaagacagagacggttgaaccgattgttttagatggcaaatctttgtctgtaaaagtggtttttgtgagtaagaaggggagattactacttggtagttcacgtggattatttctgtatgaaagtggtgtattcagaaagattctgctggactccaatgccttgtctgctgtgaatggcctaatggatattgtagatggagaggatgatagtgtttggatcgcttcaaatggaggattgatccattataatatggaaactggaagatcacgagtgtttgagaataatattagaggaggattaaattactatagttgtctggctttgatgggaaatactatttatttaggtacggcaaaccaaggcatgctgaagtttgatattgggcaggaagttttctccatatatccgcaaataggtaatggatgtattaaggatttggtacctgtaggtaatgatacattgtatgtaggaatcaatggaagtggtgtcaaaattataaaagcatcttccggacaagaaataacgtcaatagaacattctatacaggaagatgccatttgttcgaatgctgtttattcattactgaaagataaaaatatcctttatatcggtacttacatgggtggaatgagttatacgcctacgcgtgggaataccttttccatctattcttttaaggataaatttgattcccataatctgaatgtgcgtgcgttctggattggtaaacaagggcgaaaagtaataggtacccgtgacggactttattatatttccgaagaagagaatatagtgaaacattacactataaaatcttcgatattacgttcggatattattttgtcggttaaacctttgggagaagattatttgataggaacttatggtggtggcatgtatttgctgcatgcagagacgggtaaactgtctttctttaaaccggatgattgcttcaggcaaaattcatttaccggatgtgaaagagataaagagggcaaatactggatagggagttcttatggggtgtatgtctataatgaattgaccggacagtatgtaaattacaataatagaaattcgtctcttgccataaattcaatatttactttaaaagcagattcaaaggatagaatttggataggaacgaatggagctgtttttttgtatgatatgtcaactggtactttcaagtcggatgtatttcctgaacatatagaaccgtttacaaaaagcatacggtatatttatgaggataatcataaaaatctatggttttgtgacgataaagagggagttgttaaagttgatgagcattttactaaatttgagcatctgacagttgatgatttccttcccaataattcggtcatgagtattattgaagatccgcatgatggaggactgtggtttagtacacaacgtggtttactgtatatcaaagataatcatcacaagattttctctctttatgatggcattcccggatacatatttaataaccctgtacagattacagatgatggctctatttggtggggcaatgaaaggggattagtaaaatatacttctcagcttaaacatgaaagaaaggtaattccattacctcctgccattacatcagtagctgttgctggtagaatccttcagacgggagatgaattgttgcctttttcttcttcatttatggagaagatctctttgcctgcagataagaataatattgcatttacgttttctgccttgaattatgctgttgtaaatacggatatctatgaatattttttggaagggtatgataaggaatggttgactttgatgaaaggcaatcaagtagcctatatgaatcttccagttggcaactatgtttttaaagtacgggcggcgtctaatccgggtgcagttatggcggttaaggtggaagttgtacggggactttctttcaccttatggatggtggtactttgttttttaacatgtttggtacttctctatagctattatgctttgctgggtaaatataggaaaatgaaagaggatatgcgtgagaatacagtacaagtcgaaggagtacagaaggagaagtatcagaaatccagggtggatgaagaagaggtatcacggataaaacaaaggttaacagaatgtatgaataaggataagatgtatctgaatccggatttgaagttacaggatgtagcgaatactattggctgtaatgcgggagatttgtcacaggttctaaatttatatttgaatataaactttaccgattatatcaaccaatatcgtgtggaagaatttattatccgcgtgcaggataaatcagcttccaaatatactttggcgtttctttctgagcagtgtggatttagctcccggacatcttttttccgttcatttaagaaattgaagggtaaatcacctgcagagtatattaaggagaaagatatcattttagaaatataacttcttgaaaagagtaccaaaataatttggtactctttctttttatataattaaaatattgaaatatagctgtttattgagaaactcgtttcagcctttaggttggtacctattacacttctcagaatgtctgaaaagaatttcaacttactaattttgttgtcgttgaaatcaatttgttcatttaaaaagtgctatatcatgaaacacaaaaccattcttttgcttgcttctttatttgtagtgggaattgcttgtaagcaattcgaccgggaattttcagtaaataccaatattgattattgtgaggcccaggctttacgtacattggccattgttccttctggctcagaaggaggtattcctaactcgatcgatggagatgatgttaattggcatttcaccagtcccggttcatggacttcaggtttctggcctggtattctttggtatttatatgagaatacaaaggataatatgtggaaagttgcagctgaaaactatactcaaaagattcttcctgtaactcacagaaaagcaaggagccatgatatgggattcattacgatgtgtagtttgggcaatggatatcgtttgacgggtaatacggaatataaagaaggattattacgtgcagctgattctctttcaattctgtttaatcctgaagttggtacttttctttcatggccgggtatggtaaaaaaggaaaattggcctcataatactattattgataatatgatgaatcttgaactgctattttgggctgcccgaaacgggggagaacgccgtctatatgatatggcgtgtgagcatgccgataccacaatgaaatatcagtttcgcaaagattattcatgctatcatgttgccgtatatgacacgattaccggacattttataaaaggtgtgactcatcaagggctgagcgataactccatgtgggcacgtgggcaagcatgggctatttatggttatactatggtatatcgtgaaacgggagaagtgcgttttctgaactttgcccgaaaagtagcagatgcttatttatcccgtttaccggaggatttaattccttattgggattttgatgctcccgacttgtcttctggagaacctaaagatgcttccgcagcggctattacagcttctgctttactggaactttctacttatgtaaccgagcgtgactcttcacattattattatgaccaggcagaaaagatgcttgaaatgttatcatcttctgcttataaggcaggagatacaaaatatgcttttttgttacattcggtaggtcatatgcctcgtggtggagaagttgatgcatccattatttatgcggattattattatcttgaagcattaatccgttttaagagattacaagagaaacgttctatactggctaatttataaatacttccttaatcttatctattatgaatacacaattgatgattgccggatattgtccggttggaaattactctttcgagataatttataaaaagtatcacacttttttcgtgcactatgctgaaaaaacgatgggagaggaattgtatgctgaagatgttgtacaagatgtatttatcaatttgctacagcagactaattattttgtatcggaaggtgcagtattgaaatacatctacaaagcgctttataaccgctgtattgatttgatacgtcataagcaaatagaacagcattatgaagaagtctctggaaatgactttatatctgcattgaatagagatgggcataatactcttttgacaaaagaattttttgtaatagtagaaaatcgtataaaagggttacctcctaaatgcaaacagatatttgtaatgaagtataagaatgagtattctaatccggaaattagcgaaaagttaggattatcgatacgaacagtagagaatcaaatatatattgcccgcaacgtgttacgagaatatgtggattcttatctatgttcctaaaaaaaatagcgaaaattatcttttgtttgagtgaatgaaagtttatttccgtttaatctatgttcattgaagatatattgactaaataattaaatgtgatttttatgttaaacttaaaatgcatgctatgaataagaaagacaaattctttatgcttttagcattgtcctgtttgccattaagtgaaatggctgcggaacaagtggatggtatggctgtatctcctataactcaggaggtattgcagaattcggttaaaattaccggaaaggtagtggatgttcaaggagaaccggttattggtgctacagtaatggaaaaaggtaccaccaatggcatcattacagatgttgacggtaactttacattaaatgtttctcccaaccggaagttgcaggtttcgtatgtcggttatcagactcaggaaattacaattggctccaatcgtacgttgagaataaccttgaaagaggactctgaattgctggatgaagttgtggtagtaggatatggtacgatgaagaaatcagatttgacaggtgccatttcttctgtgagtactgagacattggttcgtggaggtaatgcgaatgctataggagctttacaaggatctgttgcaggtgtcagtattttgaagagcaacaataagcctggtggtggctatgacattaagatcagaggcgtaagttccatttctggttcaagtgctccgttagtggttattgatggtattcccggagcaagcttggataacataaatccggatgacatcgagaagatcgacattctgaaggatgcttcatctacagcaatctatggttcgcgtgctacgaatggtgtcgtgatggttactacaaagaaaggctctcttggtgaccctaaaatcagctatagtggctatgcaggttttaggaattatactcatgttcccgaaatgatgtcgggggatgaatatgttcaattggctatggaaaatgccagagcacttaataataataactataaaacccttgaggaaatttttacagatccgtctgaattgaaagccgctaaggatagaaattattatgattgggtagatgctattacatcaccggcatttatgacgagccatactatttctgctacaggtggaactgaaaaggctaagtatacattgggtggtggctattactttgaagatggtatgcaatttccccaggaattttcaagatataatatgcgtgctgctgttgatttaaaggctaatgattatttatcatttggaggaagtctatatatgacccattctgttagggatactggtaattcttcattgatggtcgatgctttacgtatgtgtcctactcaacatccttatagccttgtaacgggtgaagaaatctggaaatatacaagtaacggtatgttcaatccattgataactaatcagaatgaatttaataaaacaaagaagctgaatattctttcaaatgtatatgtgaagttgactcctgttaaaggattggaactgacatcttcctttgcctctaatatgacgaatgaccaaataggccaatatcgtggtgtctggactaaagcattgcaggggactgccaaaggtgctactaatttgttagataagaataactatacaaattgggtatgggataatattgttcgttacagttgggaacataaaatacataagatagattttaccggtgtatactctttacaacaaaatcaggatgagaagatgcgaggagcatccaaagatctccctttcaactctttgtggtataacttgcaaggaggtgagatgacttccatgacttccagttatgtacaatccaatcttatgtcattcctggggcgtattaattatactttggcagacaaatacatgttgacggcaagtttacgttacgatggttcttcaaagttggctgatggcaataaatggtcattattcccgtcggtggcagtagcatggcgcctgaaagaagaagcgttcatgcaaagtgttgattggctttctaatctgaaattgcgtttgagttatggtcagaccggtaatgatacggtaagcccttattccacgaatggaaccattgcaggttcacagtattattcattcggaaccaatacggttattggtacttatcctaataatattcgtaatgataagttgggttgggagcgaacctctgaatacaatgtcggagtagatttcggcttctttgataatcgtatatcaggatctgtggaatattataatcgtttgacgaaagatttgattatgaacaagagtataccaactcatttgggatattccagtgtacgcgataatgtaggctcagtcagaaatcaaggtttcgaaataatgttgaatactgagaatatccgcttgaaagatttctcctggcaaacaacttttactttatcttataataagaatgaaatcgtagacttggctttcaaagaagatttgggtgtttattccgatcgtttgaaagggatgcagggagattataataaccgttggtttattggacaaccagtgcaattaaactgggatcttgaaactattggtgtatggcagttgggtgaagaagaggcggctaagaagtatggtcagaagcccggacaatttaaggtcagtgattataataatgatggagtaattaatgataaagaccgttttatcaatggttctcgtattcctaactggacaggaggtatgaccaatacattccgctaccaggagtttgatttgtctttccatatgcatttccagactggagcaagactgagaaatcaattctacgtatcttatgcattggaaaataataatgctaatctgggcaatatgaaaaaagattattggaccccagagaatcctaccaattcatgcgcacagccgtcgaatatgggaccttacagagatcagaatacaacaggcaaaagtgtatcacacattgttcagaaaaccgatttcttgaaggtatcctatattactttaggatatacgtttaagaaaaatctcttgaatcgtataaaaatgagtaatctgaggctttacgctacagtgcagaatccgtttacctttacaggtttctccgggtttgatccggaacaacccagcgagcaagtatctaattcagatatgataacttgtaatgtattattcggattaaatgtttcattctaaaaaataaagtactatgaaagtaaaaagatatctaataaaagggttattgaccctgacattcataagcgggtttgtatcctgttctggttttcttgatgaaacgaattattccagccagtctgctgatgagtattttcagacaaaaacaggttatgaggggttaattaatgggtgttattcccggttaaggacgatctacaactctaaagaatacatatctctcggatgtcttggtacagatatatgtacacagaataatacgatagggttgtctaatttaaatcaatacccagttaactatgatgctaacgaaggtagtgtttatacaatgtggaataatctgtatgcggcgctgaaagatgcgaatgcggcaatcgatcgttctgataaagtaattctgttgagtgatgatcccgatggcctggcagatgatgtactggaacaacgagtagctgaggctaaagcgctacgtgcactcttcttgtttgagattgtgcgtaattggggacaggcgcctctgatgattcatgaaccattagctccggtcaagacagctgagctttccgatggtgcgcagttttatacgcaaatcctgagtgatttggaagatgcaatacgtatattgcctgcccgacagactggtagtgattatggacgtatgtctgcttctgctgccaagcatttgcgtgcgttagtatatttgaccagaggttatgagagttatgcagactcccgggattttgaaaatgcatataaggatgcggtagatgtgattaataattccggtcataagctattggaagattttcaaatggtacattgccaatccaatgaaactaatgatgaaatcatatttagtgtgggattttctacaggtgccaaccataatgtgaataactggcctaaatggttcttgttcccttatagagaaggatgggcaggactttcaaaagattcttattatagtaatgacgatgctgctgccattcctactaagtttgcctatctgatgtatgattggttcaaggatcgaagagcttctgtaacgtttatgagtccgctgaatggtgatccgaaaacctctactgatggcagggatacaggtaagaactggtttcagtgtacaggtgccattgaaggagtatttgagaaaggagataccgtcatctatttccctgtacctacggatagtaaatttaaacattggtctcaggcagataaagatgctgtgaaatataaggtttataattttccaacgggagatcctgctgatatgtcttctgacgattatttcaagttaggttatcagtctacaaattccaatacccgtgcttttttgccagtttggaaatttaaggatgctaatactgtgtacaatgaaaatggcaatgcttccggaacccgtgacatctatatgttccgccttgccgagacctgcttaattgctgcggaggcagctgttaaaaataatgataatattaatgctttgtactatataaataaggttagagaaagggctgcgaagaatgctttggaaacaggattatccttatatacaggtactgtaactttagatgatgtcttggatgaacgtgcaatggagctttttgcggaagtacctcgttggaatgatcttcaacgaacccgtaagctggcggaaagagttttgaaatataattgggataccaggaatatagccggcggtatacctactcaattaactgaagagagttttttaagtaagtatattcgtcgtccgatacctttaacttggttgaattctttgtctaatggtcaggaactgggaaataatccaggatggcaataggtataacagataactgatacttagaggactatcttcacgaacgaagatagtcctttttattatgatttacttgggtatatgaggagtaaagaaatctatagcttttgaggagaacaaagcatcgtcatttaataatatgtctattactcttttataatatgattattgccccattacatattggtcatttctggttttagtcttgagacaccaaaaatagtgatgaaaataagaaactcagagaaattgaccagatattgggtttcgttttttcaaaattgattctttttatcgttttttttcttttactttgtttcgtttttaatcttatactatatgcaagacattagatggatcattattatactattgaatcttttatactgttcttcggctttggcaaatacatatgcttttcgtagtttatcaagggctgatgggctatccgatttaaaggttagtgcactttataaagactccaatggtttcctatgggtaggtacagctacttctgtagaacgtttcgatggtgttcgtttcaaacattatccgattcatggaaatagtgaaaaaaagaaatgggtaaatgttattgctgaaatagaagggcatcgaatattagtaggaaatgatatggggttatgggaagttaagtcagagaggttgaaccctataggtcaggatacaataaaaggtggagtgcgtgaaataatttcagatcatcagggtaacttatatctgggaagtgaaacaggattatggattcgaaaatattccggagaatgggaacggataattttagataataatccgttgacagcagataactctatttttgccatgtgtctagatgaaaaaaataatctttggatattaaccagaaaagatttatatctggtggaactgaataatgaaagaaagacgactctatttattaatccacttttcggtaaacatttatcttgttcttatcgtacagttaaacgtataggagatctactttatataggtaccatggaacaaggtatcatctgttttaatacggttacaaagcaattcagccgttttatggatattggttgcaatgtgataaatcagatctccacagatgggaaagatttattatatgtaggaactgatggtggaggagtctttttcgtttctacccggcaacagaagattattcagaattttagtaataatcctaatgaagtggaaagcttacgttcgaattctgtttattctctgttgctcgatcgtgacggaatactgtgggtaggattatatcagtttgggcttaatttcacttattataaaaactgtgctttttcggtatatagttttcctccgtatttcgattcgaaaaatatagctgtgcgtactttgaatattggtgaacatgaaaaaatgataggctcgcgcaatggtttattctatataaatgaaaggaatggaaatgttaagacattgaagactcctctgttgcgtagtaatattatattgtgttgcgctacatttatggaaaaatattatataggtacgtatggaggtgggctgtatatattcaatccttcggatatgagtgtgcaggattttcgtccacaggagaagacaccctttttgaacgggcatatcttttgtgttaaagcagatgtcgacaataagttgtggattggtacctcctcaggagtatattgttatcaggatgataaggttatatatcattgtacgatggaaaattcaccattaccggggaataatgtatatgatatcatgtttgactcaacaggtaaagggtggatttgcacagaaaatggtctggcgatttgggatccatacaagaagagggtttatgcagatgtttttccatctggatttatacataaagaaaagataaagtatgtttatgaggattcggaacataaactgtatttcattcctgataaagagagattatttatatctgatttatctatgaatcattatgcatatcttgcccctaatagcttgcttgaaggaaaagaaataacttttgttattgaagataaacagaactggctttggttaggaacaaatgatggtttatatcattatgataagaaaaatacatttattccatatagttttgctgacggtgttcccagttcaatctttttaagttgcactcctgtgaccgatcatggtgaaaatatgtggtttggtaactcaaatggtttgctaaagttaggagccaattggcagagcgtagaagaaaagactcgttattctgttgctatatccgaaatcatggtagatggagaagcgcagaatctagtattgaacgaaggggccggttattatgaatgtcgattagaaatgtggaggaggaatgttacagttaatttttccggactgacttatactgatccttcacacatgttttatgaatatcggttgagagagaaagatgatgaatggcaaattcttaccggtaattcaactctaactttttatgaactgtttccggggagttacaaattgaaagtaagacgtatgggagcaccacaatcagaaacaactttgaatctctatatatctctaccattaatctattatattgggctttttagtttgattggcatattgatgttagccggagtctatttctatttaagaagaaccgagcagattcagagcatcacaaaatggtgtgttaaatctcagcctgtcaatgaggagagtgagatcgatggagaaaagaaatatcggactaccagtgtaacggtagaggaatgtgaagaactgttgtgtaaagtcaggaaatgtatggatactcaaaaattatatcttaatcctgacctgaagttaaatgatttagctactgctactggggcttccatctatactttatcttacttatttaatcaatacctacatagtggatattatgatttcgtaaattcttgtagacttgccgaatttaagcttctgatagaaaaaggagcacacaccaagtataccctgaatgcattaattgaaatgtgtggttttaattcccgtacttctttttttcgttattttaaaaaaataaacggtatttatccgagcgagtatatcaaaacttttgagaaacaaaattaactgtagatttgcggttatgcattgttataagaagatgagtataaataatcatcttcttataacaatgtgtgtccttttagggtatgtcaatgggggtaaaaacaatgttttatcctctgaaaagtcttttataattatttgagactcatgctttttgtttcttatcttgttgattgatagttgattaattaattattttgtacttctaaaacggaagggatgtattgtggcttacaggaagaatatttttctttttactcctttatatttgcagtcataatcattaaaatgcttccatatgaaaaacgctgcggtcctttcaaatcaggtaatagctgatgcttatacagggtgttacgatttaatattccgttacatctataataaaattaataatagagaaagagctgaagatttgacacaagatacctttttgcgtctgttgtcttatcgtgatatgttttatctcaatatcgatacaataaaatatttcgtttacacaattgcccgtaatttggtgacagactatttgcgacgttactataaagaacaagaaataaatgcatatttgttggaaacagtcaggacaagtgtagacgatgttgaaaacaaactttatgcaaaagaattatcctggctcgaacaggagaaattgagtagacttccttctcaacgaagaaaagtgtatgcaatgaatcgctttcaatataaaaccgcctttgaaatttctactgaactccacatctcaccgcgtacagttgaaaatcatttgcttattagtcgtaaagagatccgtacatatatcaaacaatctatttaattataaagtatttattaatttattgttatgaaaaaccgtaaagtgaattttaagagatgctacctgtcagggttagctttggtcgtggggctaatttttattagctcgtgtaacgatggtgacaaagggtataaagagtatgaccctagtttgcctgtggtaattgatgaaatttatcccgattctggaggatattttgatgaagttattctgcggggagaaaatttgggcagtgatcctaaacgtctgagagttttttttaatcagaaagaagcaattgttgtaggggcatcaggggatcgtgcattaatacatgtacccaaacttccgggcgatgaatgtaaaataggtatgctgctcgatggcaatacaacagataccgtattttgtaaacagtcattcaaatatcagaaaaactatcagctacagtatgtctgtggacaggtcggttccactaatgcaacatttgtagaaggtagttttcagactacagaatttgggaaaaatatgtttaatttgacagcagatcctgaaggagtcatttatttaaaccatcgtgttaccggtacagggggaagccttgtttacattaatgagaacgaatttatgactaaatttattgcttatggagatggaaatgcaggagaaccggcagctccttggtatgacaaggtgacccagaaagtttatttcacggctatgcggaagggctatttctgggaagttgatccttacgatagctatgcggtggtattgcggcaattggtggcgcctaacgctgaatatcaggccaaagggtatcgtccttataaaaatggagatttaatgtggtgttattcattcgtacgtgccaaagatgctaagggtgaagaatgggtttattgtcgtgcctatgatggaactttgttccgtttcaaatttgaggatcgtgtttacgatgtagtaggggtgtgcccttcaggagctgttgataatttcatatgtggagaccctgaggacaatacgaaaatatactgttcacttaagcaaaagaatatagtgacctgtcttgatctgtcgaaagacatttccgatcccggctttgaaactgttgtctgtggcgttggtggtatgggaggtagcgttggcgatttccaggatggtcattcttccattgcaaaaatgaataatcccgaacaaattttactgactcgggatccagaaacatcggaaaaaataatgtatgtctgtgacgctaaaaactgctgtgtgcgtcagttcaatttagcaactaacatgatgactactgttgccggtattggtaaacagaaaggattttcaacgggaagtccgaaagagtcgaaactgaattggcccataggtatttgtttatctcccaatggagatatctatatagcagatgcaggcaatcgcgttataatgaaattaatgtttttataatcaatcttttttaatctgtaaatttaaaaatgaagaatcaattaagactcaaaatgtgtcttttcctttttagctgtctgatggcggttatggcacaggcacaatcgtttgtattgtctggtatagtgcaagatgaaaatggcgaaccattgattggggttaatgtgtatgtgaaagataagcccggagtcgggactatcaccaatgtggatgggcatttcactatgcaagccgatcgaggtgataaattgcagttcacctttataggatattctacagttgaatatcttgctttgaaagccgataagaacttattgataaagatgaatccggatacagaaatgttgcaggaagttgttgtcgaagcttttggagcgaaaacccgtaagatttctgctacaggagcagtcacgtctgtggatgtggccagtttgcagttacccgcaaccagcttggctaatgctttgggtggacgtgttgccggtatcatttcgatgcaatcaagtggagaaccgggaaagaacatatccgaattctgggtgcgtggtattggtacattcggatatagttccggggcattggttttgatcgatggattggaaggtagtctgaatgacgtggatccggccgatgtggaaagtttttcagtattaaaagatgcttctgcaacggctatgtatggagtacgcggtgccaatggtgttgtgttggttactactaaacgaggtaaaaatgagaagttgcagtttaaagtgcgtgccaatgcaactttgtcatggttgaaacgtctaccggaatattgtggaggctatgaatatgctaaacttgccaacgaagcattggctgtacgtggagatgatcctaaatattctcaaaaagaattggaaatcattcagtatggtcttgatccggatttatacccggatgtggattggcaggatgttttgctgaataattcttcatggcaacaaacttattatgccagtgcacagggtggtggtagtgtggctcgttactttattagtctgaactattccaatgagtcttcagcatataaacaggataaaaatagtcgatatttcaaagatgtagcgtataatacttttggaattcgtgctaatattgatatgaacttgaccaaaaccactactttatactttggtgtaaacgctaataagacaatcaataacttacctggcagtgaagatactgacaaactttggtctgcatgtagtaagttgactcctctttctattcctgttgtatactctaatggaatgttgccttcagcatcgggtacagatgatttggcttctccttatgtaaatctgaatcatacaggtttaaaaacaaaggattatactaattctgtatatacattgagtgttgatcagaaattggatatgataactaaagggttaaaattgaatgtgcaaggtgcttatacttctaaggaatggtttgatgaaacgcgtaaagttgttcctgaattatggtattatgatcatcgtgatgccaatggaaatctggcaggaaccagacagagtgtagcggaaactgttcaatactcaaagtctcaagatttatatcgcaaatattatttacaggctaccatgacttggaatcgtcagtttgcagatgttcataattttacagctcttgtgcattatgaaatgagtgatgagaagacggcctcaaagtctgtagagaaagttgatggtaaagatgtagaaaatagtatgttagctattcctgttcgttatcaaggtttgtctgctaaattaggatataactacaatgatatatatatgattgatggtaacttcggttatacaggttctgaaaatttccagtcgggcaatcagtttggttttttcccttctgtttctctcggatgggttcccagtaactatcagtgggtgaagaataatttgccatgggttaattattttaaaatacgtgcttcttatggtttggtaggtaatgaccgtatttcaagtaaacgttttccttatctgaccagcattaatgtaagcaattctggtgctacagcctggagatatctgcatggtaaaattgttgaaagtgtgattggtgctgataatttgaaatgggaaaaggccaagaaaatggacttgggtattgaaggtaacctctggggaaaaattgattttactattgactttttccgtgatatacgtgatggcattttccaggaacgtaagcaagtacccgattttgtaggtttggtaagtatgccttacggtaatgtaggtagtatggaaagttggggctccgacggtaatatatcatttacccaacgtataaataaggatatggatttcactattcgtggaaatttcacttactctacgaataaagtgaaatattttgaagaagcagataataagtatgaatactattcggcttccggcagaccttataattatcaaaaaggctatatcgctttagggcttttcaatgatcaggaagagattgataatagtccaaaacaaacatttggggactatatgcctggagatattaaatataaggatgtaaatggagatggtatgatcaacagcgatgaccgggtaccgttaagttattccaattatcctcgtttatcatacggatttggcggggagttccgctggaagaagttgagagtgggtgtcttgttcaatggcattggtaatacaacctattatcgtgcttatactgatggtaaagataatgttggctacattcctttctatgaagaaaaatatggaaatatactaacgattgcagctaatcctgccaaccgttggattcctgctgactattatgatccgactattcctgctgccttaagagagaacccgaatgcactttttccgcgtttgagttatggcaaaaataataataattcacaaacttctactttctggcaaggaaaccgcaggtatctgcgtttacaagaactcagtttatattatacgttggatttgccgtttgttcgtaaatgtggcattaataacatagatttggctgttattgctaataatttatatacctgggatactgtggatttattcgatccggatcaggctgcaagtaacggtcgtaaatatcctataccaggacgtgtaagttttcaagcaaccattactttctaattttaaaatgttgaaacaatgaaaataggaaaatcatttaaagttcttcggaatttgctgttagcatcttgtctggcacttccgggtgcatttacttcatgtaattttttggaagtggatgatctttttgacgatacgatgaagtttgatagcatatttgtaaaatatgactatttggtacaatacatgtggggagtatccgatttacttcctgacgaaagtaatgtctttcgtgctcctttcaatcctggccccttagctacggatgaagcttttaccaattatactagtaaagatggtataaattatgtacttggcaagattaacgctgataatatatcaggaaagacaatgaatatatggccttctatgtatcaggtgattagaaagtgtaattatattcttagtagaaagcatgaagctaaaatgacggctgtacaggatgaagaagttactggttatactcatatgttgagaggatacgcttattataacctgatacaaaattacggtccctgtattctgataggtgatgagatattccctaataatgaacaacctgaagcatataataaagcccgttctacttatgatgaatgtgtggattattgttgtgaggagctggagaaagcggcaaagtacttgccgagggatcttgcttccagttattttggacgaccttcccgtggtgcggcatttgcgctgattgcgcgtttgcgtttgcagcaagccagcccgttgtataatggagggaatgcagcacgtactacttatggagactggaaacgttctattgatggagtaaactatatcagccaaacttatgatgaaagaaagtgggctgtagctgctgcggcctgtaagagggttattgatatgaataaatataaactgcatactgtaagcattgatccaatgcaaccggcccgccctcttccttccaatgtgccggatgctaatttccctgatggtgccggagggatagactgttaccgttcttatagtgaaatgtttaatggagaaacgattggtagtaagaattctgaatttatatggggccgaagttttggagatttgaaaggacatatggcagatgtatttccaccaaatgatattatggggggatataatggactttgtgtaacacaaaagttggttgatgcttattatatggttgatggcagagatatcaagaatgctagcgaagaatacccttataatatcgctaagggcgctgtaacggatgataatttttcaaaggtaaaggaaagcttttccggttatctaatacctgcaggggtgtatggtatgtatttgaatcgtgaaaatcgtttttatgctactgtaggtttttccggtcgtcattggtttgtaaaatcaaatacacagagccaatatggtccttataatgtgtggtaccatgaaatgaacactgtgccgggatcagatctttatgcaggaaaatactcctctgttaacaatgtgatcgactatcctggaaccggatatgttcttaccaagtgggtacatcccatggatgctttaaaaggaacaggaagtaatttggttgccaaatattatcctatcattcgttatgcggaaatattgttaggatatgcagaagctttgaatcatttaaagacatcatatactattgaactgccggctattaatggaggaaacctttctcctgagacttacaatgtatctcgtgatccttctgaaatagcaaagtatttcaatcagatccgttatcgcgtaggacttcccggtttatctgctgaggatatggtggatgagaccaatctggatgagatgatcaaacgtgaatatatgattgaatttgcatgtgagaatcgtcgctattttgatgtgcgtcgttggggtatttacgagcagactgagaaagctggtatatatggaatgcgtttgggagaggataaatatggattctaccaaactcctattccggtaaatcaggttaataatcgtaacagaattgttgataaaaagctaattcttttacctttaccaaaagctgaggtacgacgtgtgcaggatttggaccaaaatccaggttgggaaaactaatgataatacaattatataaagcaatatgttatgaaaaatatatgtaatgaatataataaatggctattgatactgccttttgttggtgtattgagtagctgttcgaatggagatgaattctttaaggaagagcgttataagaaagaaatctatgttgttagtgatgctagtcaggtgtttcaagctgagtatgaaatgacaaaaagtgatgaagccatgaaaacactggcatttgctgtcagtggcactaaccctatagatagggatgtgaatattgtggtggagaaagatgaggaattattgacggagtataattataacaactatagggatgagactgataagtacgcccatggattaaatgaggtagattatatattatcatcttcttctgtcactataaaaatggggactgaatttaaaaatcaggttggtaaattgcctataactttgaaaacatctgtattggagaatttgtcggtcgattccatctactttattccattccgtattaaagaggcgagtccttacgaaataaatgaggataaaagaaatgtattgtatcgtatttataaaaagaatcaatatgcatcacagcgcaaaaatacgttttataattctataggttatattggttctgctttttttacttcaacaaaagtagtgcaaccattgtcttataataaaattcgtgtttatgttggtggtcaggtttatagtaccagtgataccaaagagactataaataagaatgctatgattattacggtcaatgaagataatactgttactatgtccccttacagtacagaaggggggctaaaggtaaccactcttgttccaagcgataatccgaatgatacttcggggtcgtatggatatcgcaatgtgtataatccggacgagcaatgtttctatttatattatagttatgacatagggaatggtgagcagattatccgtgaacagatgatattagaataattgtattttgaaatgccctccttttgtactggaagaggagggctgtttttttaattgatagataaaaaaataacatgggcaggtttcttatactttgtttaatgagtgtagtctctttttcagcgtattcgcaggtaggactacttgatgagattattttcggcaacatacagtcggaaaagaagcataattttgctacaaatgctacagaagtaattaagggcgggctaaacgagtcggcacgattgtttcttcctgtggagggagaacgtgttgaaggtgggaatatcacttttaagatgaaagtcgattcagagaagcagaattactttacagctcgcttttggggttccgattcaggtaacagtaatattttaatcctattttgcgagggtaagcaaattggttaccgccatttgggagattatgatatgctggatatagctaatgatgaagcaccttttccgggacgttttacctatactactttacctttgcctctgcagatgactcaaggcaaaaaagagattgaattaagtatacgttctactggaaggattgcccgctatggaaatacattcgatcaatatcagaaagttatgacggaaccagcaaaggcattgtacaaaggatatacccataccgaaaaatgctttattcctgcacggcgtgaaaagcagggtgtcatgccttcgcctgttgtacgtatagctcctggaatagaagtaatggagcaggtaaaagtacatgtcaatcgtgaactcaagaaatttatggcaaaagaccgactggatcaggaagaattatgggtactttcttatgcttataatgaaccttggaccatagtatatcacgacaggaaggttgctgaaaaaacaatagaaactacagaccggtattacgtccgctattcacaggatcctaaatcagtttataacgattcttggctcacagtgggacctttgtgcttggctttaaatagctttgtccccgaagtacgcgaggtactcgatgaaaagatggaaaatggacggacgcgtcgtgataattggacgcagatgtgtgtagaatgtctggactatgccaagacacatcgccggcaatataccaatcaaagtctgattgtcgatctgaatttatattgtgtcaatcggttcctgtctgttattgcgccagaaaaagcattgcctgcctatcagactttaaaatatttatatgaatccatgggaattgttccatggttgggaagtgagacatctgaaggaccttcgaaaccactgggtgacaactactttcaactttcagcaaaaggacttagcaaagaacttggttttgttggcggatatggagaaatattgcactggatgctacgtgtttatgaaattacaggtgtgtgcggagaaacagacagccgtgatcctttgattcgtgctcagttgttgaaagtcttaaaagcgcgtggttatttccgctatccttctgtggatgaagatgggaataaagcaatgctagctgaggctgtaataggttggcgcgatcatggaaagtatccgggaacgattctttatggtgaaaaaggattggataaagaaggggatcctttgatgacagcagcctctacgctcgatcctattgcggtggcctatgcgcagcagatgctagatgataaccagttttttcatgttgtccgggaaaaaatgaaggacagttcgctcaattccacttataccctattgcgcctgccaggtgaatatgaattgattgcaaagcaacctcgcagagaggataaacttccgatgtcttctggaatgccggatgcattgtttgccgatgaagaagttgggacgatagcattgaagaatggtgaagaaatattatatgcctctttgtattggagggcaaactacgctataaactatttggcaagagtgcattatattactccggaaatagataggatagctactatttatgaagatatcaaatttacaccgagtgggtatacttataaacggccggaacgtactaacctgtttttttcggatgcccgtcatttttaccccgaagtgaaatcggcacatacaggtgaggaattgcccattgctaagattccggaaggcatccgctacgaaccaggttgggaaaatgtatatgccggtaggggagagttttactcattgcggtacggtaagtatctgatagggatgaactgcacacaggataaggattttgtattgaatattcccaccgctaaaaaagtggttagctttcctgcaaaagaaattgttaaagaatcttctgtcatagtaaaaccgatgagtacagtcgtatttataatagtggaataagcttattatggataaagaaaaataagagaatattattattggatatgaagaagaatataaaaatactattattgacaatcacgtgttgtagcgtgctacatgcacaagatcatctgaggttatggtatgaaaagcctgcaaacacttgggtagaagctttgcctttagggaatggctatattggcgcaatggtctatggtaaagtagaaaatgaactgatacagttgaatgaaggcacattatggaccggagcaccttgtgtaaagagtgtcaatcccgacgcttactcctacttatcagaaatgcgcgaagcgttgtcgagagatgattttgctgcagcgggaactttgagtaaaaaaatgcaaggctatttctctcaaagttttcttcctttgggagatcttgaaattaagcagtcttttggtgataggaaagcctggtatttaggatataaacgtgagttggacctgaatgaagccatactaaccaccagtttttgggaaggcggggtgcaatatgttcgcgaaatgtttacttccgctcctgatagagttatggtcctgcgttttaccgcaagccaaaagggaaaacttgcgttggattttactacgaaaagcagattgtcggatgcagttgaagctttgggggataattgtttggctatggatggcgcagcaccagcccgtctcgatccggcttattataatcgcaagggacgtgaatctatgatgagggtagatgagaatggatgcagtggtatgcgttttcgttctttgctgaaggctattcctgtggggggaacagtcacgacagataaaaaaggtatccatattaatggagcggacgagattcttgtcatatggacggctgcaacaagtttcaatggcttcgataaatgtccggcttgcgaaggtaaagatgagaaaatgcttgcagggcaatatttggcaaaagcatcgatcaagtcattcgatgaattaaaagactcgcatatacgcgactttgcctcttattttgagcgtgtaagtttgcagcttacagatacggtgggtagtaaggtgaatgcacaactaccttccgacttccggttgaagctttattcgtatggtaattatgatccccagttggaggagttgctttttcagtatggtagatatttgctgatttcttcttcgcgtcttggtgggacagctgccaacttgcagggaatttggaataaagatttccgtcctccttggagctctaattacaccataaacattaatacagaaatgaattattggcttgctgaaactaccaatttatcggaaatgcacacacctttgcttagctggattaaagatttgtcgaaggcaggtcgtgctacagccaaggagttttatcatgcaaaaggttgggtagcacatcataattccgatatttgggggcttagtaatcctgtggggaataaaggagatggaagtcctgaatgggcaaactggacaatgggaggaaactggctatgccagcatctatgggaacattattgtttcactggcgataagcaatttttggcagatgaggcttatcctgttatgaaagaggcagcattgttctgtttggattggttggtggaaagaggagattatttaataacttctccatcggtatctcctgaaaatttgtttgtggtggatggaaagaaatatgctgtttccgaggcttctacaatggatatggctattattagagatttattttccaatttgatagaagcttcggaagttttaaatatagatcgtaagtttcgcaagcaattggttactgcaaaaaataagcttttcccttatcagatcggagctaaaggacaattgcaggaatggagtaaagactatgtggaaaacgatcctcaccatcgccacttgtctcatttatttggtttgcatccggggcgtgatatatctccattacttacgcctgaattagcaaaagctgcccaaaaaacatttgaattacgtggtgatgatgggacgggatggagcaaaggatggaagataaattttgctgcacgcttgttggatgggaatcatgcttataagatgattcgtgaaatcatgagatatgtcgatcctactttaaatacgaatcatggaggtacatatcccaatttttttgatgcccatcctcccttccaaattgacggtaatttcggtgctacagccggggttgccgagatgcttttgcagagtcatttaaaagaactgcatttgttgccagctcttcctgttgtctggccttcgggcaaagtaaagggactcaaggctcgtggcaattttgaggtagatatagtttgggagaagggaacactgaaatcggctcggattcgttcgaatttagggaataagtgtgtgctccgtacatccgttcccgtgaaagtggaaggtgcagaataccttcaatcacaagataaaggatattacttgacaacatttgccacaattcagggtgaagactatcggatatggagagagtaaacactgatatttgttcttgtctttcgcgtacctgaaccgtatccggactgtacttgctccgtacattctccgctcagaggtacctctacacggagccgatacggagcaagtacggtacaggtacggcgtagatactttctgaacaggattcaatggaataaattgtatgagagtgaatcgaatatccttttaactgattagaatttgaaaaatacatctgaatatgcgaaaaatagtaacatttttatctcttttgcttttaatgggaactgtggttggacaaaatataaccgatttgtctgtaatgcaccgaaccgatgtggattcaagtttattgaatatcggtacttatccttctattgtagatactgtattccttcatccggatcgtgttcgttacgatcaccgctgttttcagttggatgggaaagacacttttatatttagtggtactttccactattttcgtgtgccccaacccttgtgggccgatcgtttccgtaagctaaaagcagcagggtttaattgtgtggaaacgtatattccttggaattggcatgaacgcactatgccccgttctgtaacagacgaatcacagattgatctgcgtgaactgaacgattttcttgtaatggctgaggagtttgggttttatgtaatccttcgtcccggaccctatatttgtgccgaatggagtgggggaggatttccacaatggattatgcagaaaaagcctgctaagcctgcgtttgatgtttggttgcaaagtaatgatccggaatttatgcgctggaatgaacattggtatcgtgctgtgtgcagggtcgttgcgccacatcagttaattcataaaccggtaggcggcaaaggagttatcttgtttcaggtagagaatgaattcaaccgtgtccgttggttcccaaaagaagcaaaaaaagattatctggacaagttggcttttattgctcgtaaatatggaatagaagtacctattattacgtgttggactgatgaatcacgcaatgtggaaactggtatattgaatggagtggtagatatggtgaatagttatcctcgctggcagatagagaagaatttaggccgtttagtcgatttgcagatgaaaacacagcctggaaaaccattgatatcaggagaattgcaaggtggctggtgttgtgaattaggctggcagttgagttggaagcaggatggacttcctcctgtgcagacacaaaatattactctttatactttacagcgtggattcagtgcactgaacttctatatggcagtagggggtacgaattttgatgattgggcggcccgccagcaagtcacttcctatgattacgcagctgctattggcgaagatggggttgttaacgagcgttaccgtagatttcaggggttatctacttttatcgatgaacacggtacgcgtattgcccgtgccgatctagtatctttggattatattacaacagatacattagtgaagttagcattacgttgtgctaaaaatggagatcgctactatttcgtacgtactgaagaacgttcacgccaacatttcggaacaattcgtacggatgacttggaacttgattttgctttggaaccgttcgggtctatggtttattatctgccggcaggcgccacacagggggaatggttcccaaaacttcctgatcctcagatacgcccggcaaccaaggttgcaaaaatagaacttaaaaaaacaggtgaatgggctgataaattgccaacaaaatggacacgcttgaagaaaggtgaagcgattgataaccatggtatttacggccgtcattttgtctattataaaacaaatgcttttgagggatgcactcttgaagtagggcgtatcggtaagaaggtggtgaacgggagtgttgctgatacagtactggtttctgtgaacggaaaactacttcctatatttgcagaaacgcaggaaagtgcccattatcgtattccgggtgattcgcttagcggaagaagagtggaagttgtcttgttgtttgaaaataagggattgcatcaccatactaatcggacagtagagaaattttggtatataggtcctacctatgtacgttgtaaaggtaaggaacttccacttagttatgcgtatcttgagaacgaacgtggagtcaggcattcttcttctatttctataaaagagaattttgacgaaggagatacagttggtgagcctttacttaaatggtatcggtactcatttgatttgccgcagggccaaacggttacctcttgtttcctgaaattagagcagaatggcaatggcttcatttacgtaaacgggcattgtattggtcgttgttgggagcagggaccgcaatctgaatactatattcccgagtgctggctgaatactagtagaccgaatatcgtagcagtcagtttacgccctactgctcaaggggctaatgtaaaggtggcaggcataaaagcgttgcataagtgaagtcacctgtatgatttgacaaaccataagtaaacctatataataaaaatgaaagtaaaagcagtaattttctcagtaatcttgtttgttgtgaatggttcttctgtttctgcccagcagaatgaatgggaaaatccggtaaagtatgagtggaataaggaaaagccgcatgccgatttttttatttatgagcgtccggaagatgcaatgaaagaagaggagagattttctccttggtataagtcattgaatggaaagtggaaattcacctattcgccaactatagagaaaagtgataactatttttatcatgagaaattgcaggacgagagttggactgatattgcagtaccttccaattgggaattgcagggatttggtgaacctattatccgtaatattcagtatgtcttttctccgaatcccccatatatcgatgtagataatcctgtaggaacctatcgtaagacatttactgtcccgtccggctgggaagacagagaaataatgcttcatttcggttccatcagcggttatgcgcaaatatatgtcaacggacaaaaagtggggatgagtaaagcctcgaagacccctgcggaatttaatgtgacccgttatctgaaagaaggggaaaacttgcttgcggttcaggtctatcgttggcatgacgggagttatatggaggaccaggatttctggaggctgacaggtatagaacgggatgtatttctacatgcctatccgaagtttaccatttgggacttttttttgaaagcagatttggatggctcatataagaatggtctctttcaggcaactgttgatcttcgcgaatttagcggcaatactttcaaaaaaggtttgcttaaattagaattgctggatgctgccggaaagagagtgctgacacaacaaaagatgttcgatgtagacggtgaacttacgactgtgtcattctctggttccgtaaagaatgtagcgaagtggagtgcggaaaaacctgatctttatgattgtgtactcactttgctggatgagaataataggaaattggctgtgactgctcataaaacaggattccggaagatcgagattaaagatgctaaattaatggtgaatggagtgcctgtttacataaagggagtcaaccggcatgaacataatgacagtttggggcatacgcaaaatcgtgaaatcatgatgaatgatctcaaactcatcaagcaattgaatataaatgcggttcgtacatgccattatcccaatcatccattgttctataaactctgtgataaatatggtatttatattgtagatgaggcaaatatagaaaaccatggaatgggttcggttccttattttaaagataccatcccgcatcccgcttaccggtctgagtggtatgcggcccatgtcgaccgtatttctcgcatggtggagagagataagaatcatgcttgtgtcataggttggtcactgggaaatgagtgtggtaacggaaaagtttttcatgatgaataccggcgtttgaaagaatatgacccgggacgttttgtgcagtttgaacaggcatgggaagactggaatacagatattgtatgtccgatgtatcctaatatgggaaggattaccggctatcgtgattctggcaaacagcgtccgtacatcatgtgtgaatatgcgcatgcgcaaggcaatagcaatggaaatttcaaggatatctgggacgtgatttatgatagtccgaatttacagggtggatttatatgggactttatggatcaagggttcaagatgaagacagaaccgagagacggccgggtgtactggatgtacaatggtcggatgggcagttataaatggctggaagataaaaagggggagctgaacacgggtactgatgggattatatccgccaatggtattcctaagccgcaggcttatgaagtgaagaaagtatatcaatatattcaattcaatgaaaaagagcttggtaaaggtattattacaattaaaaatcgttatgattttacgaatctgaatgagtatgactttacttgggagataattaaaaatggcaagaatattgctaccggagactttaaaatagatttgaagcctcatcaggaggcagaagtacgtttggagcttcccgcaatacccgtggatgaaaatgagtattttctgaatctctatgcttatacgaagaaagcgacagatttggttccggcgcattatgaggtggcgaaagaacaattagaattgaaacggggtaatgtgtttacctctcttcccgattgttccggcaatttgacgtataaggtagtggataacgtgctttcttttgaatcgggaacagtttccggcaaaatagatttgaaaaaaggaatgttgttcgactatatgaagaacggtaagaaacctatcaaacaatatcctgaaccggctttctggcgtgcaccgacagataatgatttcggaaataaaatgcctcttctggcaggcgtatggcgcactgctcatgtcaatcgttatgtcaaagaagttacagtaggaaacaagaatgaaaaaggactgccggtaaagattgagtgggtgttgactgatattcaggtgccctatactatggaatatctgatacgtaatgatggttcgcttgtagtaaccggaagtattgacctgaacggaaccagactcccggaactgccgcgcttcggaatgcgaatagaactgaatcagccatacgataatttaagttattacggcagaggacctcaggaaaattatattgaccgctgttccggttcgtttataggttgttatgatgataaagtcgaaaatcagtattatgaatatatacgtccgcaggaaacgggtaataagacggatgttcgttggctgactttgctggatagcgatggagcgggcataaagattaccggtttgcagcctatcgctttttctgccttgcattttacaccggaagaccttgatccgggattgacacgcaaaatgcagcacacaattgatgttattccacaaaagaacgtttttctgcatgtagatatgaaacagcgtgggcttgggggagataacagttggggtatgtatccgcatactgaatatcgcctacttgataagaaatatagttatagttatatactggaacttgagtaaataggttgtcagattcgtatgttagtaagtccggaaatagtaatataaacaatataaaccatgaaacgaattgttttatcctttttaatgctgctgtgtatggctacgatatatgcacagaaagtaaaacatccttcattgctttatacgcctgagcgtattcagtcggtaaagaacagaatagccagagagcctgaagtagccgaatgttggaaacagattaaagaaactgccgacaaaaagttgcaaaatggtgggctgaacgatgtggaatatctttcattgacttatctgatgacaggcgagaagaagtattcggatcggataaagaaaattcttctggacgtcatacaggcaaagacttggggaagcgctgaaatgcttgcgcgtattcccgtatggactgccgatttgggattgtcacataaggcgcatctttctgccattgcttatgatgccatttacaacgatctttctacttccgagcggaaagagattgcattagggttgaaacgcctcgctttagatccttcgttgggagattggttgcttgaacctacgcgtatacatgcattgaattctatggggcataattggtggacttcttgtgtctgcatgggtggtcttttggcattgagccttcagaatgagataccggaagctaaggaagaggcaagatttttgaatgaagccttgcccgagtggtttagttttgccggagatgtacttcagcaaaagccgaagtcatttgatgatgccggtggtatgtatgagagtctgaactatgccaattttggtattcaggaggctttgaaattccgcctggcatggatgaatatgaatccgggtgagaggcagccggaaatacctgaactggaaaagatttctgattattttatgcatgtatgctacccgcgtaccgggattttgtataatctcaattttggtgatagtcataagaatgtgtcggctgaaagcagtttgatgttgctgtatgcgttgggtataaggaatgataatatgctttggtatatgaatcaggtggagcaagggcaacatcgtgacggttattttatgaatcgtcctatgggatttctctatacaccggatctaagtaaggcacctaaggtaccggagttgaaaaagtcgcagttgttttctgatttcggttgggccacaatgcgtacttcctgggaaaaagatgctacgatgctggcagtgaagtccgggcatacgtggaatcattcccacgcagatgcgaattcgtttattctttttcataaaggagtcgatatactgaaagatgctggtaattgttggtatccgaaccctaattatcgtaattatttcttccagagtcaagcgcataacgttgtattgttcaatggcaaagggcagtcgcgtgagcagcagtatcatggttctacactacgtggttatcttcatcatttgctggatggcgataacgtgaaatatgtactggcagatggtacaggaccttattctgatcagttcagtcgtaactttcgtcacttcttatggatagataatgtcatttatatggttgatgacctgaagacgcacgatatcggacactttgagtggctttggcatccgggcggagaggccaagaaacaaggtattgatttggatataacaaacggcaactcctcgatagtggtacgtccactttatccacgcttgttggcgaagtccgattttgttcatgattatccggaagacctttattgggaagtagtggaagcacctaccgaagatctgaaaggaacagaaaattactattcttttcatctaccagccaaggtggatcgtgtgaaagggctgacggctattattttgaaagacactccgggtgagaaagaacttcctcagatggagagacgtgagggtaaggactggatcggactgcgtatccgaaacaagggtaaagtgacggatttgtatattaaccagttggcagatggacgtctgatgcatagtaactcttggattgaagctgacggttggtttacggatgcttatatgtttgccgttacttatgaagaagatgctgaccctgccgattcaaacgatctctttgtttgttatggtagtgccttgcgacgtggaactacatcttattttgcttctctttctaagttatttatcatccaaaagaaagagaataggaaactgaaactttggatagaagggcagccgaaagtacacgctacttttggaaatatgaaacgtccttctgctttggaagttaatgagaaagcaatgccggtgatttatgaacgggcaacggtgaggataaaatattgaagttttaagcgcactttcaacaataattttaatatttgattaggtaccttagtcctgccaatcgttttttcttataaagcatacgatgttcgctaacttatacagcggacatcgtataaataaccatcttaaataatacaatattatgaaatttacattgttgaaatgtgccatgttcttatttggcattttattgaacatcccaatgtcagtgttttctcagcgtacttttgtacatcccggtggggttcataaccgcgctgatctggatcgtattaaagaaaaagtattagcaaaggaatcaccttggatagaaggttggaatctgatgattgaagattctaaagctcaatatacatataaagcggctcctgcggagtctgtttcaggaccaagtggacgccggcaacgtgcggcccgtgatggggtggctgcatactataattttctacgttggtatgtgactggggatgaacgtcatgcagagtgtgcggtgaatattctgaatgactggtctgcggctgtgaatggagtgattaccggtgaattgtatcaattgcctgccagtataatggtgcaggtagctgaggtggttcgtgcatatcccggctggaaagctgacgatattgaacgttttaaaaaaatgtgcaaggagtatttttatccggcatgtaagcagtcaggaggttgtggaagttggtctggttgggacggaccttccaatacctgcaatctggctatcggaatattctgcgatgatgaagaaatctataatgaagctgtcgattactataaacatggtgttggaggaggttgtctgacagaaatggtaaatccacgtacttatcaggtaaatgagatggggcgtgatacgccacatgccgaaattgggccgggcagtgcggctgagctttgtcaaatggcatggaatcaaggagatgaccttttcggattagaggacaacttattactgaagggatttgaatatatgggtaagtacaatcttgaccatgcctatgatgagtgggagtggaaattggatgaagattgtgcccaacgctatttctattatccggcttgtcgctggcgttgcaatagtttgaattcttttgtggtatcgaatatgcccgccaatgaaattatctataatcattatgcagtaaggaaaggtttggatgctccttatacgaaagcggtgatcaatgcacgcggattgacagcttgcggctgggaggctccagggtatacagcttttacgtatacattggatgctgcaaaatctcctttccgcgaacatacattgccctctgctccactgaatgtgagagtgattcccggtttagaggaggtggttgtgtcttggcaatcagttgagggagaagtgattaacggtgcggtgattcagcgtgctccctttcctgaaggaccttttgaaacggtgggtacctggagttataatactaccaattgttatgccgatactactgttattggaggaaagagatattactatcgtgtggcggaagtgaataaagcgggtactggtgcctattcggatgttgtttcggctatcccttgttcagggagagaactacctgaagagtggagccttatgaatttaagtggtgcttccatatcttccgaagtatcttataatccggttaataatcgtacgtttaaagtttatggtacaggaagttcctttggtggcaaaaatgataatgttacatatttgtatgttccggtgaaaaacaattcaaccattactatgcggttgttcgatgctataaattctggggataaatcggatcgtacagggataatgatgcgtgagagtttggattctaattcaaagatggcatcgatagggttagcggatgatggctttcggacggtctggtttgcaccgcgggcttcagcgggtgccaatgccagttggatgaaaggaaatacccacacttggctggaagtatggttcaagttagtacgtgaaggcaatctctttaaagggtatcagtcacaagacggagtaaagtggtttgaagtaggttctatggagataaacatgtccggtgatttttatgcgggtatttttgtcgcttcatataactcaatgcgtgcttttattgatcaggttactgtgacagacgatttacatccacaactaccggcacctactggtttaaaggtggaagctgaaaacagtacttgtgcacggctggaatggttaccggtagaaggagcctattgttataaagtgagtcgttctctctctcctgaaggaccatttgaagtacttaccgaaacctgtgaaaattcggtgtatactgatatgaatttgtccgaaaatacatattattattatgaggttcgtacggtaaatgtgagtggagacggcaaagaaactgcaacagtttcagtcaaaaccccaagtgtgtccataccgggaactcccgaaagacttagagtgttgcaaggaagcgctaaagcttatgtgtcgtggaaagctgtagatgaggctgaaagttatacagtctatcgtgctaaggaggagaatggtgcttatgataagttggctacaatcggcactttggcttatactgataatttgccggatatgaatggctcgtattattataaagtatcggcttcgaataaggtgggagaaggacctttgacttctgctgtcgctcttgttgcttcggaactgaaagaactccggttgctgaatactgcccggataataggaactccgggttcatggggtggtatgggaaatacttgtgataaggcgatggatggaaacataggaacttactttgattctgatgtggataccaatgcttgggtaggcttagatttagggagtaatatgcgtgccacagtttcccgcataggatatgctccacgttccggttatgcttcccggctttatggtggttgttttcagttagccgataataaggattttattgatcctgtaactttttattgcattgatgtgtacgatacggaatattatgtagtgagtcatcgtgaagtagatataaataaggcttatcggtatatgcgttatttatcttcaggtacgaagagtaattgtaatataagtgaggtggaattttggggataccccattgaactaaaaccacaaactattacatttgaatctattccgaataagagtctgactgatagtagttttgagttatccgctacggcaagctctggtctgcctgtttcgttttccagttctgatccggatatagcaaaggtagagggtaatcgcgtttatctgaaaaatacaggtcgttgcgagatttatgcagatcaggaaggtgatgatgagtatgccatggcggaacgggtagtacgtacgcttttgattaatccgacttctattcaggaagtaacttctggtactcctacatggtctgtttcccctaatctttgtactgattatctgattgtttcaggaaatgaaataacaggttatgctttctatgctgtaaatggatataagatatcagaacataaggtggctgggaaggatttaaaaatatctgtgagtcatttaacttcgggtatgtatttattgaagttgacgaatgggacagctacagagattaagaaatttataaaaaggtagattgatagagaaataggtattggttttagataatgtaaagaggctgtcaccggacagcctcttattttacatatgtatgcgaggtaactatctgataggttccattctgaacttcaaattatattctttattcttttgaatgagatattgtggaagcgggccgggaccacaactggcatttccgagaccattttgaatggcattaatattcaatatggtctctgcacgacggaagttgcctaagtcgtgtccataacgagcaaagaacaggtctttgtccgtatagtgcaatgcgctgaattcaaatggaacatcaccggaaaaacggatgcctgaaccggctttatctttcatctccagccagcgtgtgtcgcaacgattacccatagattgggggcggccatagttttctcccatttcagatactgttttggaataaatacctagaaaagctgcatcttttctatcccaataattctctataggaccacgaccgtaccattccacttgttccagtctttgacatagggacatttgtaaagccaatcgagggagattgaaatggtcatttgtggtgaatgtggcatctacatcgattgtgccattggcataaatggtatagtttacacaatatgggactgttatattatctatagttgcctccatttttgtgatcacctttacataactatgatcttcggccaattggtaactgaaatctttcacttcaaaagcagttggtttccaatcacgtttattattactgatatagcggtaaccattgtaggtaagaccttcatgtccgtggatgatatctgaattatgatatctgagaagtatcatgcgcgcttcatctgtattgaaaactgtttcaaaattatcagctgtgatacgtaaccagtttttgtccgctgccagcgtaatggtaccggaagatttggatgcatgtgctgctgtagcaggtgtttgtatgataaactgttcttctgctatagtatgtccggcttttccccatgaggttgtttcattcagaataacgtatacattgatataatattcactattggtatcaatcatgagttgtttgaatggaatccggatatctgcactatgtcctgctggtgtgaatggcagttctgtttttgcagatttaattcgtctaccatttttgtagatatcataaattaaagagaaatcctttagattatagaaagcatattcatttttcactttcagaagttcttcttccaattcaaacttgatgtattggtatatcttctttacttgtagtaatttagctgtaatcgcacggtcggaagttatgatgccgttgaggcagaaatcttctttattcggattgtcaccaaaactgccaccgtaataataccggttatccgcttctcccggtttattcataccttggtctacccagtcccagatacatccgcctatcatacggttggacttgtattcgatgtaatcccagtattcttttaggttgccgatggcattgcccatggcgtgggcatattcacaaaggaaatagggcttttcagaattcgttgtatccattttgatcattacctccatcgagggatacatggatgagtccatatctgctgattcattgtatccctgataatggataagtctgtcgtccatggtccggatggcttcatatactttgtagaaattatctcctttgccgcactcattacccattgaccagaaaatgacgcacggatgattccgatcacgctgtaccatgcgtacattccggtcgataaaagcggccgcccaactctctattttaggaagttcacggtttccatgacattctaaatctgcttcgtccattacatacataccatagtagtccatcattgcatagaactttacatcattgggataatgactggtacgcactgtgttgatattattctgtttcatcaataacaggtctttcatgtatatttctgccggaattgctttgccgaggcggggatgtgtatcatgcctgtttacacctttgaaaatgacaagttggttattaatgtatatctttttgttacgcaactcaattttacggattccataacgctgagtgagtgcttcttttacgactccatattcatcaataagttcgatgtcgatattataaagattgggtatttcggcactccataaattgggagattggacggaaagtttaccatccaggtaaatactttccccggattttacttttccggcattcatctcgaatttgtcaatgcatatcttattattattgataagtgatactctgattttactgttattggctgtatttcccttatttgtcaattctgtctttacttgaatggtggctgttttcaggtcgtcactaacgtcagattttaatatgacatcgcgtacatgcatcttaggtacaccaataagatagacatcccggtgtataccggataagcggaacatatcctgatcttccagataactgccatctgtccatcgatagacttcacaagcgaggatatttcttcccggttttacatatttagttatattgaattccgcatcattgctggctccttggctgtaaccaacttttttaccattgacgaatacatataaaccgctgtaacaaccatcaaaatgaatgaaaacctcacgttccttccattcgacgggtaaaatgaattctttacgataggaaccgacaggattaggttcgttaacaatggtatatccatcttggggctgaataaagggaggattattcaaaaatggatatgtaacatttgtatagataggagttccatggcctaatgattcccaggtggatggaacaggaatttcggcccattcagaatcattataattcattttgtagaagtttaccggacgttcagaaggttcttttgcccagttgaatttccattgaccatttaaaagttgatagtaagatgaattattccgcttccagggcattgtgtatgattcgtcttttctcatttcttcggtattggcaaaaggaatgaaggttacatgtccttcttctttgttaatagcgaatattttctcgttttcccagtcattcttgctactggctttggctgcaatttcatgatgagaattacgggtagtttgagctgttgaaggcttgtacattgatagtaggataaagaggatcgggaagattctgcttttccatggaaaaaaatgaaatgttttcatggcattgtaatattttatatggattactatgtcgataaaacgtttcattctgccgatttacctaatttatataaaagaaaaagggatttaaatctttctgtgttgagtaaaaacaagtcgctatacgtcttttagtaaaagatgatacatcaaaaaacaataatttactaactttgaaaatatgaaaagtattatggaaacatcattgaaaagaattgttcatctgttactgttagctgcattgtcaatattaacagtcaatgccaaagttatcagctatccagctccgaaaggagagactttatcttccgattatatggtagaagtggatggcgtttcggtacccgtttatatggcgaaaacacagcatcatgataaaaaatattcgattgcatattttgatttctcaggaacagtgactgttaagattaagagtaaactatctctgggtcacttgaatatattaccggataaatatgcaattcatccttctgttaataaagatattgctactttccatctgaacgaaccttgtgatatatcttttgagccggatggttgtaacagcccgttaattctattctgtaatgaattggaaacagatattccttcaaagaatgatccgaatgttatttattttggtcctggggaacataatcctgaaaacggtttgatcagactaggcagtaatcaaacactttatctggcagggggtgcggtagttaatgccggtatagaggctacaggcgataatattacaatttgcggtaggggaattttagatggttccgattgggaacataatgccggccccactgactatatgataaatgctaagaactgcaataatttggtaatgagggatattatcataaaaggttcttattattggactattgtacctcagaattgtgatcgggttttgatagatcgtattcgtttggcaggttcccgtgtaggtaatgatgacggtgtagatccttgcaattccagtaacgtgacgattcggaattgtttttttcggacagatgatgattcggtttctccgaaggggataacccgtgccggaggagaaagagaatcaaaaccggttgagaacatagtagtagagaactgtgtgttctgggttgattttgccaatgtatttcgtatggcaacggaaagcagttgtccggtatttcgtaatttcacagcgcgtaatgtggatgtgattcattttcctgaccgtgaccgtgttcagatattttggttgcatcctacaggagaaatgccaatggagaatttgtgttttgagaatatcaggattaatggagaaattccgtataatctgataaagctgacacctgcacttcagttagtgggtacacgtccgatagagaaacctactccgaatgatataaaggtgggacctggcagacgtggtcccggaagttgtggttatggagaatttgtagttgttccttcttatggtccttatattcataatgtaactttccgtaatattaccacttatggcaaagaaagtgatcgcaaggcggaaagaggagccgtactgattcagggaatcgatgaacggcatgatgtttccggtatcatattcgataatgtcgaatactatggcacaagaataggtgctgatagcccgaatatacaaactggcgattttgtgaaacacgtacaatatgtaaagtaataatataaagtagaattctgaaatgaaaaaattatttgtaggagtgttatgggtagctttgtctttgagtgtacagggcaaggaggtgaatatgacatcaccggatggaaaataccagtttacgttgagtgatagcggtggacaattacattattctttgacctggaacggaaaacagacagtaaaaccttccttattgggaatcaatgcaaatgtagaatggcgggatggagttgaaatcggaactgtggatagtagtcggaaagatacgatctggcatccggtctatggtgaaagaagtgaaattaaagactgctataatgcatggaaaatacttgtcaatcgtcagaacggacgtgataagttggttcttgatatccgtgcttatgatgagggaattgccttccgttaccattttccgggcggacaatatctgaagattacagatgagtatacagaatataccatgcccgaaggtactaaagcctattttacccctaaagctcagaccccgtattcttatctgcctcttgaaaactggccgggcgagtcggaccgtccattgctgctgacactggcaggtggaggatatgtctgcctggctgaagcgcaagtagtggattatgtacgtacgaagttcaatgtgtcatcgactaaaaagaatacgattatatcggctatgtatggtccggtagaagatattgcaccttattctactccgtggcgtgtaatcatgtgtgctgacaagccgggtgagattttagaacataacgatatcctgttaaatcttaatccgccatgtcggattaaggatacttcctggattaaaccgggaaaagtgatgcgtgaagtgaccttgaccacagaaggtggaaaagctttggtagactttgctgtaaaacggaatctgcaatatatccactttgatgccggttggtatggttttgagtatgataaggcttcagatgccactactgtaacacttgatccgcgtaggaatccgaaaatagatgcactgaatctgaaagaagtggttgcttatgcgaagcagcatggcatcggagttatgctctatgttaatcagcgggctttgcagcaacagctggatgagatacttcctttgtataaatcatggggaatttctggaattaagtttgggtttgtgcaggtaggttcgcaggtgtggacaaaatggatgcacgaagccgtgaaaaagtgtgctgattatgggctgatggtagacattcatgatgaataccgtccgacaggctttagtcgtacttatcctaatctgatgactcaggaaggtattcgcggcaatgaagaatttccggatgccactcacaatgttacgttgccttttacccgctttgtagccggagcagctgattatacaatatgttactatcgccaggactttggcaggctgaatgttgaaaaagataattatggtgttccccgttctaagtccatccagactacaccggcgcatcaattggccttagcagctgtctattacagtcccctgcaatatatgtactggtatgataaaccttcggattcacaggacgaaccggaattaaagttctttgatgatgtgtacaccacctgggatgatacgaaggttttacaaggtgaagtcggtgagtttattactgtagctcgccggagaggagaggaatggttcataggctcaattacaaataatgaagcacggacgttgccggttgatttgagttttctgcctgccggaaaagattatgtggctgaaatctatacggatggcgacaaatctattcctacacgaacgaaagtcagagtctcaaaattccgcgtcaatgccaagactgtgctgcattttaatctgagggcttcgggaggttctgccattcgtttagtgcccgaggttactaaggataaatctttaaaaacttataaacaacagaaactgtgatgaaacatgtgaaaacaaaaaatagagtggtacgggaagtatctgataagcatactatgaatatacgagttttgttttcgttggtatttcttattgtaatcacgttcactgtctcagcccagactgccgtatggcagtgggctgtgccggtacgtaattttgctaaacaaccgaaaaatcctgatgccaaagcctatttatggataccagagaaatgtaaacacgtgaaagctgtgcttgtggcacagcataatatggaagaaatttctataatggaagatgagaacttccgcattaagatggcagaattggatgtagcacaaatatgggtttgtccttctttcaatcatggattcgactttacagatggagcatgggaaactttagagggttttctgaaagatctggcgtcagtttcaggatatacggagttggcatcggctccattgattggtatcggacattcggcagctgccagctggccctactatttagctgcatatatgcccgaccgtacattagcttgtatctcagtcagtggacagtggccttatgtacgtgataaatggctgaatctggatatctggggagagcgtaatatcgactatatcccatgtcttgaaacaatgggggagtatgaatctgcacatacctggagtaatgagggattgaaggagcggaaagaacatcctttgttgccattgagcatgttggcttgtcctgccgaaggccattttgcttattcgcccggtaaggctgagtatatcgcactttatataaagaaagcattgcaatacgggcatgtggatcctactaaaaccggttggctcgctgagcgttggaaaaagaatcaaccacccacttgtatgcctgcgcctgtagcagaatataaaggtaatccggatgatgctttctggttttttgataaagaaatggtagaagctactcaggcctatcaagcctgtttccggaacatgaagccgcagttagtgggtgtcgtgcaagaaggtaagccggtagttcagcgtgacagtcatttgcaacttcatccggtatttctgcctcagggagatggagtttcttttcatctgactcctgttttcctggatacggttcccggtgatagtccccgcctgaagaattggacggacttgcctgtaggtacacgcattggacatgcagcggataattccatttgctttgaaatgataacaggccccgcagtaattcacaaccataccttcaaggtcgaatggaatcggagtatttcctgggcatcctctaaggctgatattgtttttgctgttcgtcatccgggagataaggaatataaaccgattgttcagcaggcgcagatcaccatacccgttcgcaatatagatggagtaccacagaaagtctcctttgctgcgttggctgatgtcaaacgaggaataaagtctgtcacattacaggcttcttccgacagtggcttgcctgttggcttttatgtagaatccggaccggccagagtggagggaaatcagttgatatttacaccgattcctccgcgtgctgtttatccggtaaaagttacggtagtggcgtggcagtatggcaggagtggagaacctaagattcaaacggccgaacctatcacacaaacattctatattttatagcattatctgtattgcgtgaatttattgtttcagaaattcacgcaatgcagcattaaatgcttcaggttgttccatgttcagcatgtgtccgcagtcttccaacacctttagctttccgttcggcagatatttcagaatttccggttgattggaatagcggttgttggctgacttgccttccacgattaaagtcggcactgtgggatgattcttttttatggcttcataagcatccagacctgcaactacccgtacttctttgtgtaatggttgccaggcatcccagtcatcaatcatttcccataaaggctgacgcatcctttctttccgggtacctcccgaactcatcagcccttcaaaccattcacgcttcatgacgtcgactcctttcactttcagggcggcaatttcttcatcccgtttcagagcttcttctttggtcataggttggctaggtcctttcgacttacgtatatttccacttgcaaggaaagctgatgccatgcgttcgggaaaccaacctaacatatcggcaccgatgaaaccacctaacgacaagccaactatatgtgctttccggatatggagagaatccatcagtgtcaccaggtcttgtacatgggtaaactgataatcttcggtctgagaggaagaagcaccatacccccgtaagtcgtaacggatcacacggtattctttggcaaattcagcgaattgttcatcccacattctgtgatccagtgaatggccatgtacaaagattacaggttctccgcttccggcttcttcataatagagcgagccattgccaacatcgatgcgaccggacttaaaatcagccgtctctcccgaaatgcggagttgagcatctattttatgttgccatacattatgcattaaaacgtctgtgtcagtttttcggctatccacttgtatacggttcatttgcagcttacctacatttacggcaatcacgggaatacgtgggtccggtttttcgggcatgaacgtagcgtcatttactgtgatattctccacatttctgatgaacaatccataacttggcagatttccccatacagtgggctggggataacccttttcgtcttccttcacttctttgaaagaagaccagtatctattccatttcgttccgcttgctacatcgtggcgttttccttccattgccggatcaggcagaaaagcaccttccaccagtccgccgcgattcatgaaacggatattgttcagatatatgttctctatttttgcattctcgatacccgtgattgaagaacagaaattaccggttccgtaggcagtaatattgctgatttggatatttcgcattcttccgacgggaggaaccggtgcatcgtccgggtactgtcttcctctattggctaagcgtatgtaaagtggacattcagtcccttcaatcaaaacattattgatggtaaccccatccattattccgccgtctacaatttctaatgaaatggcggtaattccacttggagttgattttagaatccgctccccggtatgacggcttggttttacgatacagtcggagattgaaatattcttaaagccgcccgttgattctgttccacatttaatggcgttggcaaagctgctgacaatacagttgctgataattacattttcacagggagccgtacccgtactcttcaatacgataccgtcatcgtcagagtcgataatgctgttggaaaggataaaacggcggcaaccgtcgatgtctattccgtcattattgccattactatgattgtacacttttatgtgatcgatggtaacatcttcgcaattcaaataatgctgattccaaagtgcggaatttctcattgtaataccttccacatgcacatctttgcatgagataaacagaatgttacgaggccgtccgttgcggtcgccgcccaatccgctgatacgcccttttcgtccttttccttttccgtctatcgtaccttttccggtaatactgatgttttttgcatctactgcatagatgagggaaacccagccaccggcatctttttgtgaacggtaagatgcttgtggttgcacaggaaagtcatcgtaattatcactggcatagaggtatgccccgctttcaagatgtagttctacattatctttcaggaaaatcgttcctgatttataaatccctgaaggaatgataaccttgcctccgccttgccggtgacaattttcaatagcggcattgatggcttgagtttgtacgacagaagtgtctttggaagctccgaactggaaaatgttatattccgtcgaatgtgcattccctgtaagataacaacagatggcacatataaatagaaaatatgttttcatggcttataatgtttatttcaatatatagaagtttcgttccaccggttcagccgtctgtactttgcctgcaataccgtattgccaggtaactaccgttacttttaccggaaatttactgcggggtgggataggagtgaatacaatttggtctccttttatttcagccggaccttctttgatgtagtaagagacgggcagtccacagtcacttgtggcttttaaagataaagaaccgctttccgctttcacatcaggtaatcctggaaataatatatactgcctttgtccttccgtattccggtaggggatgcggatactgacttcttgaacagcacttttatatttccggtctcctgtctggcttgccaacagacatatatcaccggtacggcgcggattattcatacccatccgatagaaagatactatgaatgtggtgtcatttaccttttctactggtccacagatgcgactgattatcggtgttgcatctgcatgctcatcagatagtttggttctcagggaatccgtacatacggctttcaggtggaaagtgattccatcggcttccggattgaagcggggctgtacacgtacatgctgcttcttgttgtatgtcagtaaactgccgttttgctcaaaacccagatattgttctttctttccgcggctttgcgtataccgtgtttcggtcgcttccgctatttcacggtcaaaataccagaaagcatcgtgaggatcacctttatattgtgaatagggggcggctttggctcgcttcttctgatcgggatgccagcgttctgccagccagcctttggttgggttcaccggattcagttttactttaccgtctttcgttacttcatccgtcagtcgttgattgatagctttttccagaaatagagcaatgtatgcggctgtttcatctgccacatcgaaatgtccccgtcctgcgtcacacagaaatgagatgcaactttcaggatacatcatgcggaaggccagtgccggatttactcgggcttcccaccattcatattctccttcaatcatcagtccgggtattccatctatattacgggtacgtccccattccagattctcacgcccgtagccggtaagattcgtacgcggagcatcgccatgcagggaaatgatagccaaagtgcgttccggattccatgctgcgaagttccagggataggtagccatagccgaatggcctatgggaacgatggggacatttttcagttcgctatatccgctgacgtctgccagggagaccatcattttctcaaatatctgttgtgtgcctttcgatacatcccattgctgatcgataccgggagttatccatacaaagccgattgcaagcttctgcatcttttcgcggaaaaggggattatcaaaaagagtttcttcgctcatattgtgttgtcctacaataattgcttttatctgcatacagtcagcgggtatccacaagaaagccgtaggattccggttcgtttcattagagacgaatccgtcaaggggcacagaccattgccattcccctgcccgcaaacagggagagaagaacaacaagaggatgatcgaaaaaagcagtctatatctattcatgtttttttgttttttacagtattaatacgaacgaggaataagcttcactcaaaaataagggatttaaaacaagaggttgtgtcaaaacgttggcacaaccttttttgatgatttacagtcctgctatatttccttttgtctacgccgcttttttctcattcatttggtaacaagttgctatattcccgttgtatcgagttataaatagcccaataaatatagatttagcaagtgtaatgaactcctttcctgcttttctcagtcttgcacacatctttttgatattaaaagctatggcaaagaaggcaaagtccattgtcaccttgtcttctcccacatgccggaacctcctgtatgccatgttgtatttcatttgtccgaaaacagcttccggttctatacaccgcctgcctctatgcctgattccttcttctgagagtaacctttcccgtgcctgccgtttatattggtttaaccggtggttgacttctataatacggttcccctgtgctttaaaacaacttccacgcaaaggacagccttcgcatctttgtgctttgtaccgggcactttcggtgatgtatccgctcgctgttttgtcacgtctggttcctatgcggttcatgtgttgccccatcgtacaaacgtaataatcctcccccgcattgtaatggagactttccgcatggaacgggttgggagtataacggggacgctgctctttatggaagtagttgtacttgacaaaggcctctatcccgttttcctgcatgaaccggtaattttcttccgagccgtaaccggagtctgccacaccgatacccggtaagcggttatagcggtgctggaaggagtggaagaaagggatcagggtcagcgtatcggtggggttgggaaacagccggaagtctatgatgaactggttttcagtgcctgtttgtaaattatacccgggcttggtctgcccgttcttcatggcgtcttctttcatacgcatgaatgtggcatcaggatcggtcttggaataggaattacgttctccaaggacttcaaggtgattgtcgtattccatcagcttgtcacgatacccttcaagttctctgacctgtttctttttttcacgcagagctttcttttgttccttgtcctgtgttgcaggctgttgttccagcacttctttgagttcatccactatattagagagcatggcgggagtcaactccacggatgtgtcttttacagagttctcctgcacaatggcttcatccacctgctccagaaggatgcgaatcttattcagcaaccttgtacggttcttttcgactgttttgcgccagacaaaagtatatttgttggccttggactcaatcttggtgccgtcgatatactctacgtcaagactgatgaaacccttgtcagctaggacaagaaccaactgcgtgaagacgttgtttatctcctcctttacacggttacggaaacggttgatggttatgaaatccggatgctcatgaccggcaagccagatataatggatatcacgcaaaagaagcttctctattttacggcaggaatagatattattcatgtaagcgtagataattaccttaagcatcattttaggatgataagctgagcgccccgcttctttataaagcttcttgaaattatcaagattaagattatcaacaactgcattgactatgcggacaggatcgtccgcagctatgttttcatcaattctttgtggaaaaagaacggtttggttgggaatgtaaggacgaaaatgtaactttgccataacgaaaaactttatgcctaaagttacaaaaattttgggtaataacaaagcccgggcttgagaaagtctgggctttgcgcataaaaagagggtgtgccagcattttgacacaacctcgtctgtttttgttatatttcggtgagccttagtattcgttaataatcttttatttagaggcttctttcagttgttccgtcaacttatccatatcttccgggctggctgccgatgggaattgtagttctccttctttattgacaatggcataatgcgggattgacaacataccgttccgcccgaacttctcataaatttccattttgaaagcatcgttgatgatgacatgctctccttttaagttatagtgccctgtcatttttttccagagttcagctttctggggagtatcgatggaaacatacaataacacgatatcattttcagcagcatatttctgcaaaggtttgatgtgtgcaaacgatgcacgacaaggaccgcaccaggtagcccatacgtcgataaagatcactttacccgggtataagtcagtaatttccttaaaggtgcgtacactgtccgtattcaatatatgaatatctttcggaagttcggcttcattgaacgctttgttcttttgtatcgctatttctaatttcggcattagcacgctttggggatataatgtcttgaattcctcatacaatgcaggaataccagttgcaaaatactcacggctttcatcttccagaatgagaagtcccattgcagcctcctgtacccggccttgcagatttgttttataccaatcgaataacagttgattgcgttcattgtcatcattcgtgcgcctttcatgttgcatgaaaatatctatgcctgccatattcgatacgacatctgcaaatgcaggagagaatacgctttcagcctgactgacatttgcaaaatccaacatctgggcgtaagcgtcgtcccattccttcttgagcgtttcggaacctctccggtagttaccgaaatactgattcatatatgccatcaaagcctgtatacgtatatcttgtatggctctttgtctgagctgatcgtccacttctgccacttcgttttctaatgtagtagcgtagtctgtcagcttttgatatacggatgaggcaaccgtgtccttgccgacgttaaagatatctccccggcgtgcacgcagattaaatacgttttcattcagatcagccagtttcttgagtatttcattttctttcgtcaagccgtcaaccgggtttagttcattggatttggaagcatcgatatcgagcgtctgttttcccggagcaagatagatactacctaagtttcgctcaccatatagaaaaagggtcagcttttcgttcccgtttacaggtaaggtaatctgatacgtactgtcggcatttaagcgtaaagtatcaatcttgttcggtaagtaaatgccatctgtagtgatgttatatacaatgggagcgccggatgtattcgttactttgccttctaaagtaatattcttctgggtacatccgctcaggagcatagtggttgttatgccgccaaggcataaagatttgatgaatttcattatttgtttttcatttggtttataatctgagacgctaaaatagtgataaggttacatcgggacaattattttctgttatttctccgtgattgttcattttatcttaatcccttttataaaatcattggttactattcctttcaagtccttcatccgttctccattgattactacattttcaaacgtcacgttttgcacggttcgttctttgtccagtccttgaatcaacgatggattttctcctatgcctgtatatgtaatatttctgaaagtaacgccttcaataccgcttcccggctgtttatcatatttctcgttgaaacgtacttttacataaaacagtcgtccttcctgaatattctctacccggatatcttcgaaaagaacattacgaacctgatttttatcaccacaatccactgtcatgcaaccttgataaatcgggtcatcctcgtcatgttccaggatgtcgatgttacggaaagtcagattctctatcacttctcctgtcggtgagtccggatcgccatgaccgcctacattgatggaatgtgccacatctgcccaaagaatagaattttgcacggtaatatcagatgaacctccccaccagttccagcggtgattgtacaaagcaatgcaatcgtccgaattgcgcataaagacattgtcgataagtacctggcggcagcacatcatatctataccgtcactccatcctttacaactgaaggacttcagatttttaatcgtaattcctgtggaaccacctccaaatacggtataatggtccggattcattactgtaatgccatctatccatatattttgggaatcagtgatttcaatgccccgtacagcgtggtctatgattccccgtccgatgatgcggacattctcggctttgtctaccacgagttttgccttgaccacagctccgggggccagatatacggttgtattacttggtatccgtatctgattgttgggtaagtctttggggcggtgtgtgcccggaccgaaatacattattcctttagtttctttttcatatttttcagtctccatcgggttggcaaaaagatgcaggttgtgcagtcggtcaccattaaactcaatggagagatattgtggctttttcagagtgaaaagaatggcgttttgtatctgcttgtattcaatacctttacttaaagggcgtatggccacttcgcgcacagtaccattgtttttcttcaccattacttctacgggacttcccatatcaaattgcaccatggaagcattctgcactttgtccatatctacctgtacgttgtattcgaacaaatctttccattcgccgccggggatgcgtacgcgtacggtatagtcatcattgtgcggcatcccggtactcagtgtaccgggataagtcactagttgtgcctgtatggataagcagaaaaggactgagaaaatagttgtaataaatttcattgtataattgttttttttcgatgtttctatacttgctaatatacgaattaaaacagaatatcactcagtacaattatacgattctataaaaagaatacggagctcatcgcgggctccgtattcacgagatgaaaaggattggaaaaaacaggtatgtatatattggttagatgagggtcttattcttttttatgataaataagtgataaagaaaaggccaaattccccctttcccggatatcttattctcataatctttcatcattttctcatgaatttcgaggatttcatgtgtataattcatcattttctctaagttctctcccagttctgtttcccgtcgggcgtgcttatgaatttcctctaataaatcatcgttgactttttccagacgggctttttcctgataaagccaattcaaatgctcttttcgcactcgttccatcatggtatcatcaggataagattttagtgaattaaattcgagagctttgtcaagttcttcagtatctatcagtgggtcattgtcttcataaggttctgtgcctatagaagagcatgtcagataatgtaacctaatccattcccggatttgctctttcggtatgccgtatttctcagctactgactttgtagataaccaattagccatatagtgtttgattataagtttaaaatcattccctatacggctataatggctttatattataaaggtacggggcattactcaatccctgttagtaggtatgtggataccctgaaccacggaagagtaagcccgtaccaataactgatacaggctacgctcgtccgatggttcattaaatttccacattttactaacatcggaagaggacatgtatatatacaagatatatcatgtcgcacgttcagttgcaaagatacgccttttttcacatttaacaacgaaatcatggatttgtttctccattttgcgtaactttttattcagtaacgcttaaaaaataacttggtacataagcaagcgcggcgagtaagtgcataaatgataatttatcggcgtagctattgatattctgactatctcaattcccctcctccagttggaggaggggtgcccaacgggcggggtggtaggtgagagagaaattcctttatcttattattcataggtattttattgttttacctaccacctccccctacgggtactcctccttccaggaggaggagaatttaagatacttccgcgtaacaattctctcgccgataaattatcatttatgtaccaacttattttttaagcgttactttgtcttttgagtttttttgcgatttatcggtaacttcgtatcgcgctcaatgacatcgaaaggaatttcgctctgcttgatggcaaaaagtgacttgataacatcttttctcatggccttttatttaggacaaaatatgaaaatcttttctgaatgaaaggaaatactcgatgttttttttgttttcttggaaaaacggcataaaaagcgtcttttttccttggataagtggcgtaattgtactagtttcgtcttggaaaaacggcaaacgggtgcttttgtcgtttaggataaactgtagaagccatgctgaaaagaaagattgaccattacattaagcgttattatgagaccactcgtaatgctttgctgattaccggcgcgcgtcaaatcggtaaaacttattctatccggcaatttggaaagtcattcaagagttttgttgagataaatttcatagataatcctgaagctgtagacgttttcaaaggtgcaaagggtagtgcggatatactatttcgtctgtcggctatgactacaattccactgattaaaggtgaaacactcatatttttcgatgaggtacagaagtgtcctgagatggttacagccatcaaattcttagtagatgagggttcgtatcgttatattttgagtggatcattgcttggtgtagagctgaaggatttgcgttcggaacctgtgggatatatgggaatcaaagatatgtatcccctcgattttgaggagtttatttcgtgtgtgggcattaatgataaaataatcgactctctgcgtaatgcttgggaaagtcgcgtggcagtggatgagtttgtccactctaaaatcatggaattgttccgcttgtatctggttgtgggcggtatgcctgctgccgtgagcaaatatatcgagagtaataatttgcaagcagtaatggctgtgcagcaggatatcattcgtttgtataagcgtgacattgctcaatatgatcctgataacaaattttatatagaagagatttttaatctcattccgcctgaactcaatgccaagaataaacggtttattttgaaaaagctcaacgagaatgccaagtttgaacgttatcagaacagttttctttggttgaaaaatgcgggtgttgcattatctgtttataatgtggaagaacctaagatacccttattgctcgctcgctcacgcaatctgttcaaactttttcagaacgatataggtttgctcgccgctcaatacgccgaaggtattcagttgcgaattatcaggggggagaagaatattaattttggttccgtatacgagaatgcggttgctcaggaattggtggcgcatggtatagatccctattattataacaataagaagcgaggcgaactggactttgtcatcgaacttgatggtaaagtattacccatcgaggtgaagtcgggaaaggattatgaggtgcatcgtgctctgtctaatatcatggattgtaaagagtatgatctttccgaggctgtagtgttctgtaatgataatctgcgagtggagggcaaattagtgtatgctcccgtttacatggtgatgttccttgaaaagaataatgtggcgccaacttattacaaggtcgatttgtcgatgttacaataacctcatttttcctttggttttgatctaaaataaccctgtttttcctttggctttagactttattcagtacttttgtattgaatattaaatgtttgtctatgtttcaacgattagctcttacagcccttcatcggtggggcgaaaaggaaggacggaaacctttggttttgagaggtgcgaggcaagtgggaaaaactacgttagtgaagctctttgcccgagagtttgatgtctttattgaattaaatctggaggagaaggaaaatgcgcgcctgtttgccggggaagtatcgtttgatgatttgctggcaggtatctatgccaaggcaggtgtcaggatggaaaataaacgaactcttatctttattgatgagattcaaaatgaaccggaagcggtcaggtctttacgctatttttatgagaaacgtcctgatcttcatgtgatagccgccgggtcattgttggagagtctggtggggaaccatatttctttccctgtggggcgtgtggaatatatggctttgcatccatgtacctttaccgaatttctgggtgcattgggcgaaaacgttttagtggaacaaatagaacgattgacggttccacagtcggtgcatagctatgtgatggacttattcaggaaatatatgattgtgggcggattgcccgaagcggtggcgaactatgcgaagtacaaggattgggtaaggctgaatgatatttttaattcgttgatagctggttataaagatgatattgaaaagtatgcaaaaaagaacaaagaacaagatatactccgttacatcttaaattacggttggggattggcgggacaacgctttcagtttgccaaattcgcaggttcttcttacaagtcgtccgagatgggggatgcctttaggattttggagaaaacgcttttactggaacttgtttatcctttaatttccacctcgtttcctattcttccggatttaaagagaagtcctaagttgttgtggttagatacgggattggtcaattatgtggcggaaatgcaggaacgcctattgttcacttctgcaacggacgaactgtggaatggagacatagccgaacaagtggtggggcaagaattgttgggggcatctgttacatttggtactaaacgaatgttctgggtacgcgatgcccgtaattcgcaggcggaggttgatttcgtttataagttcaagtcccgtttattaccgatagaagtgaaggcgggagataattcccgattgcgctctctgcatcaatttatggaagagtcgaaagagaatattgccatacgtttgtggaacggaacgttttgctcggatgaaatacagttaccttccgggaaacaatatacgttgtataaccttccgttttattatgcagggcagcttgaaagtttcctgaatgataaagtggagtaggagttgaaaacttcttcgtataagagtaaaagcttcaatagtaattgagaaatacacagggagttatttgactttaccctgcatgttttgggttttgcagtaagtccgattgggtgttaaccttggtcaacaggctcgttaatgaaggtcaacaggccgagcaaccaaggttaacagagcggttgaccttagtcgctacccaatcgttcctaagggtgaacgggatgttcctcaggagaaaacagaatagtcccttatgtaaaacaaattaatacctttgcttttagtcagtaccacatgatgacaagaagtgacttccaaagggtatgcggcatgatgaaatcgaccataatggggcatatccgtcgtttatgcggggaaggaaagttaaaaaacatcagattacagaaccaattgatatatgcgccaaatgtggggtactacggtataacagaagaagttacgatgcgaaaatgtaaaaatccggcgtgagagtaaacaacctactctcacgctatatttttactctcactcacatttaatattttaattatcaagtatctatttccaaagtgagggtagtgagagtaacccgaacgaactttttattgagattgtttttattcaatcgtcgcatcttttaccatctatccaatcttcatatttcttgattttatcacgaatgtacaggacattccatttgggaacggcttgcaatgcttttttgaaaatccggatataaagatgttcctgattggtgatttctttgtgatattttttgagaccttgatgccaatcacatccattcacatacacggtacagtcaattgaatctgttgttccatccggtcgcaggcttatctgataactgcaatgcactgatttgccttttagttccggaagtttactccatatctcttttttctgtagttcttcctggcattgtttcaaagcttctctatctcccaaggtgaacgaattattgtaagttttctgccggatgactgttccctcttttacttcgcagaatatttcctttttaaatacatccctaaattcgtaactgtctatgagcctgcctccgcgtaccagatggagttcgccggaaaaccaggatgcttctatcggttgcttgccggagataccgaagatggagtcgagtgggagaggggaggtacttgttccgtgaaacaagtttatgagatagagcttgccattctctattttccattgtccggtatagccacggtggcagtcgtttctccattcttcttttaaatagggttctactttttcataaaggttcatatcatattgaagtggaaatccccgtagggcataaacggtatcgttgtatagtaaagtgtccattacctgtttttcctgatagagggctttgcagccttttcctttccatagggatagggtccacggatcagtcttccgtattttattacgtacggtgagtacgtcccatcggggaattttatgcaatgccatagatatttgttctgcatagagcttcttccgctcttctgtgacgctatccggacggtgtacatgaatttccacgctattgatgcttccatcagctttaggtagaattgtaactgttgccaccactttggtatctactaattcggggaaacgatctccgttgaattgtgtacagacaaagttcaaagcgtcctttatcgggattcctctctttaatgaattccggtagctggcttgcgaaataatctttccttgttttacctgatagaccgtttcgtattcatgttcccgaataaatcccatatggacatagtaaatctgcttaccggaaactactttcaattctccgctgaaccaggtggctgtcactctatctttcttgtcacggtatttgtcgaaaatgccgttcaggtctattgtaacttcaggaatggtgtcgggatcggcaaagatacttttgctgtcttctatttttttgagaatcaatttatcgtcttctatttgccacagagcttgataattcctccagcaagccgtgcatcccccttcccgggataaacgttcgctcactcggcggctgagaatggagtcatgttctatgggacattccagtaacatcagggtgtcttttccgatgatgattaaatcgggaatctgtccggttgcatttgccgaaagcagacagcagaaggatagaaaatggaaaagtaataattttcgtgccatagtttgtagctgaaagtaagtgatatatgcaaaagtaactcctttttgtgtaaagctaaagctttggctatgaatcttttctttttcatcgataaaaaacttctgttagtcgatttttctatttatggattaaactatatcccgggaatattgtcatagatacgtgtttcataaataaaatggaattaactcacttttaaatgaatagaattatgaagaagcaaattttaagtttggcccttgccctgtttctgggaacggctgtaggtatggcacaggaaaacagaggcgaacgtcctgatccgtcaaaacgcatcgaacagatggtaactgatctgggactgaatgaaactcaggctaaagagtttaaggcagtaatggaggaaatgagaccaaacagagatgcttcgggcgaaagaccttcacgcgaggaaatggagaagaagcgtaatgaggcagatgcgaaactcaaaaagattctgacggacgaacagtataaaaagtatcagagcatgaggcctcagagaggacagagaagagggaaatgagaagaatgaaaaaactctgccgaaacagaaagtttagatctgttccggcagagttttttgatgtaagagatatttctgagtatggatgaaaactagtcacgtacaatgccgctgacttctacctcggcaatggcagccggggacttatttacgaagcggatacgaataaagcgtgcgtttaccggtgcctcctgaaccttaaaggagattttggcttcttgttcggcgattgttgtatccagcttgttcaaggcggtgctccaccgttcattatcttctgacacttctattacataacgatatatttcagctttagggaaacagacatggatgtttcgtaatatcaatcctttctccgtgtccagtgtccacgatggagaagcgtcattggcggcggcttgccaataggttgtcgaattaccgtcagcagctaagccggcattttgtgcctcttgctggctgctggaaaaagttggattgttacgaccaaaggtctgaaccgtttctttgtgcgctttgcgtacgaaacgttggtaaggacgttcttttgctacgggtgtcaaccccggttcgtaggtgggggctccttcaaagaggatttcgatgcgtgccggagccagtcccggagaggtcgcttcaatgactgccgtacctgcataataggaacggaaagcaatggcggcttgcccgtccagaatacgaatatcgctgttcttttcaaaggtgatggacctgcctgtcgggaattcacccggtccggaaacaatctttaactgtacggatggggaattgcttaaccgtcgtccgtctgaatccagcacgctaactgtcagttgcacgtcgtctgtaccgtcagcctgtactcctgtggtttctgatgcttccagttttaactgtgccggagtgccttcttgaggccattcaggaggagctaccctggcatattcattccgataccagtaccatgaacgtttgggtatgcggaagtaatctacgattcccatctttcccagtcggctgccggcaatgctaccatgatcgaagccacaccagatagcctgtccactacgccaatggagacctttccatccgtcattttttttcaggtcgccccatccgggaatatatgctcccggccgttcagcggtggtactgccatattctgatatcacacttgggattgcaggttgctggaaatcggataaagtggcgccgtcaccgttataaccggctatgtctcctatcaaatcaattctgtctttacccaaaggacgttgtgctccgcctattgctgccggacgggtagggtcgagctgtcgtgacagtttcaccatgcgttccagtaggtgacgtactcccggtatggcttccggtgtggagaagaatgcctcgttgcacatgctccatgtcacgatggaaggatggttacgatggatgcgtatcatctccttcaactgttgcagggcgctctcttcgaagcctttgtagtctttttcactagcgggataggcgctggcgttccaatacccgtcaggctgaaatccgccgataccccagaaaggcgcttccgaccagaagagcatgccttcttcatcgcaggcttttgagaaagccggagcgtgtggataatgtgaaccgcgaatcaggtcgaagcctgcttctttcatcatgcggacatctctccgcatggctgcttcggtgacggcatcaccccagccagcctggtcctgatgtacattggcgcctttaaaaaacagatgttttccgttcaagaagaaaccctggtcggcggtccactcaaaccagcggaagccgaaagccgtttcgtcacaatccaacaattccttacctttatacagagaactgattactttatagagaaccgggtgctctggatgccatagagacggggtgcgcaatctctttgtggtttgaaataccgtcttggcggagtgggcggcaagggtttctttattttccacggtagctatcactttgccttccgggctgaggatacgggtcaccagcctgtattctccatctttgtctgagtggttacagatttccgtttccactctcacagtggaggcttttccctgattcctgcctaaatcgggagttgtgacgaatgtgccataccaatcaatatgtacgggagatttctttgtcaaccgtacattgcggtagatgccgccactgaatacatgctctccggctctgggtgccacattcggtttccatatattgttcactcgtacggcaacgagattatctcctgcctgtaccagagaggaaatgtctgcttggaaaccggtgtaccctcctacatggcggcctgcctgctgtccattgataaagatttccgcttcctgaaatacaccgtcaaactcaaggaatattttttgcgaaagatcttcttccgttagccggaatagcttgcgataccaaccatatccgatataaaattcgttcgacataaagtaggggatactgaacgagtgggggatacctgtcgattcccattcccggtcgttgtaagtcggctgttcagcacctttaatatctccgcgcatgtacttccattcacggttgaagttgatgcagctacgtggcgatatatgtgtttgagcactgagccataagcccggtgtgcacaaaaggaaaagtatgattagttttttaggattcattgaaatgacttgttgcttgatatttgcggatggattctattttttctcaaaggtaacgctttccgtatgttcacccacaaagatacgcgccatatctccggttttataccatttaggtttattaggcatgtcatcgtaaatcacttcaccgtttatcgttaggttttcgaaacgaatgtttttcactttccgttctttgtcatagccgataatcatggaaacttccgcattctctcccgtgtaggagatgtccttgaacaaaatgttttcgatgcctctgccgggagccgtacagtacttctcgttaaagaagatgcgcaggttaaccagttgcccttgtctgaaatcctctatccggatattctcaaagcggacattgcgaatcaggttattgtctcctgcattgatggcgaggcagccttgataatccagttgtttctctttatggtccagaatatctatattgatataattcaggttttccagaacttcaggattctttgtatttccgtggataccaatgaatatggggtgtgccacgtccgcccaaagggtggagttctgcatagtgatattcttgcaaccgccggtgaagcccatacgcgtgccgtaaactgttgtgcaatcgtcggaattacggcagaatacaccgtcgtacagtacgttgttgctggcgaagacattcagtccgtcgccccaaccgtaggaactgatgacttttacattccgtatcgtcacgctgtctgagcctccggtaggacattgggtgctgattacaccttctatcgttacattcttggaattgacaatgcggagtccggcccagcggttaggaatcacgattcctcttccctgtacttttacattttgagcgttgaccacctggatgaggcctttcactattgcgcctcctgccacatagacagttttaccggatggtacatttagcgtgtcacccgggaaagtatgtatgcccggaccgagataaatcagattcttatcttttattttcttaggtttgttctcatctatcggattggcaaacaagtggaggttatgaaatatatctccattcacttctatcgacaagttgcgcggacggtccagtttgaaggtcatagtgttgccggatatggatggagtgattttgtaagagagtgggcgaactctgcctgtctgaatagcaccatgattgaaggttactgatacttccacttcgccggagaagtcgaaatagctcatggaggctttttctacattatgtttggtgccccgtacttcatccaccttaaccatgtatgtatctaccggtttccaatcttttccagcttctcttacccggactgagaaatcgttcatgagttcggctccttggggggctggataggttactaattggttctgagaacttgcattgtggataatgcctaataaggcactcacgataattattaatctattcaatttcattttatatggtattataatattggttctttacatatgcgaatgatgattcgttttttgataagtcattaatatagattacataaatattacatccttttttctatattctggtgttacaataagatctatgacttttcctttagcaatatgaccttctacaatcgtattttggggtgcacatagtttaaattttacattccaatcatctggaagcccggcacctatatatatattattgccatcacattgcataatcatttcctggagtccaatcatgcctgaaccaccccagttatgatctggagtccagtcatatcccggtccccaccaggtgggaaatcttctacccgagtctttcattttttggatggtgagttctgcagcttcctttttaagccctaattttgcacaaaatatagcattttgttgccaactgattatgcccttttgttgagggacatcattaccataataccaagtattacgggcaatatccagctcctctttacctattccatgtataccccatggaaaaactgtataaagttggggaaactcagtattgttaattcgttcccatgatttggctggagaaaatgttttctttccattctgcactcggtaatagatatcgtctggaattcgttttctgaaagattctatatattctctttgctcctttgttaaatattctttgggtaaatcaagcatagcttggctgacacattttaatgctgtaacagtagttattggattagtagccattttgtatgtttcgagtgctgtggaggggtataacactaatttcccctgagcatcgagagctttaggggttcgtttcaaacttaaatattgataatgctcatcgtaaaactttaagcagctttctattaggggaagatatttggatatgtttgttccgttgtagaaataggtgtctattatcatcatacagaattctaaaacagtatcccattgatactctatccatgcattatattgtactcctggatcaaaatcctctggtcttttccaactatattcaaatccaactggtaatccgaagttttctatctgttctgtaaaacatgctccttggtgaccccaatagtgcatagagcgtaactctgcattatttaacatattattataaaagtcgaattgtgacttcatcatgtcgaaatcaccacttttcagcataggccagtagactagacgctggttctgggcagtgaaacttcctcctccccactttctgaaatcaggactataattaaatgatttatttatgtattctggatcagtagtgaaaagtcccccattgaattttgtgggatagcttccataggcattacaagcgagctgataccgaaacacttgataatttcgtcctacttgccacttctcattttttggatccggtatatcattatctatgaaaatataacttcgatcccaaaaatcattccaccattttagcgtagcttttcttatgcttttctcatttgctataatttttttttctgtttctgagagttcttgtagccattcatctattgattctgcataggctgtatgcattacaacttttatattgtgttttcgtgaaggattgatagaacataattgccagcctttatagtcagtggaggcatattttccttgggtatttccggcaggtatcatgtttggggcgaagagtctacccccaaaagtaagtttatttattggattccaaaacttatctttgattggctctaacttctgttgttttatggccagatcaaaagcgctttctccagtattgcgatggtaaaatagaacacttgtatcatcaaatttaactgtatcacattttacaatcgcttttaccggagcattcatgtaagttctgcagacttctgtctcaggctttgagagtactctttctttaaatctccatccttcataagtagcatagagtttggtgggaacattacttgtgacatcgatatgagaaactggattaaatacatctgcccatatattgattgttgtttctgttccattttttcgggccttaatttccacatatccctctttaagttttaattcttgatggaaatgatcaggattttctagaggattgggagacattgttattctaattcgtcccaatttaggaaatgagtttaactcgtcaaaagtaccacttcgactaatgtaaattagtaagtctccatcttctacccaaacattcattcctatgtcgccacctccacatggcattgattcaagtgagttggctgagggagaattccaaactatgttatagttgtctaatcctttttgtgaggcttttgctattccaaatgaaaatagacaaatgataaggcttgaaatgattttcatgatattcgttttcttacagttattgtaatagttcttttatctataatacgaataaggaaataagtctacctaatttgcgggcactttataaataaattcgtaattcacatatttgagatggattgcggacttctgattttagagaagaaaataattactattctttcttagtgttgatatttgctagtaggatcagatagcatcttgacattggcacctatgacgagttttccggcattatcaatgacttaactacgtatggtatctatgtagggaaagctattgtcaagcataaagctgtcgtaaatatgattttttgttcatgattgagttagaaaacaagaaaaatcaaattagagtaagttgtagtattgatttgaaatataagaaaaaaacagagtagtttcgtaaagttgcaactactctgtttttatcaatcctaatatggaattattcgcgatacagcattaatgttccccaacccaattggtcgaaagcgccactgtttgtgccgtaacggcttccaccgtccacaccaccttcgggacgcattttgtcagcagccatcttggcgtacttgtagccactgcccaacttcttcactttggcgtagtgattgaagagaatttcccatcccggacggaggttgccacggccattatcatcagctacggctgtatgtatggcaccgtggttcttgtcggcgcaactgcaatcaacgcaatattcatagcggttgaacggcatctgctctttggttgctagccaggaaccggcagcattcagttggtcagagccattacgtagattgaagagagcagtatattcacccattttcattattgcgttatcttttgcagcaaagaagtcgagttgggtcactgttggattacactgtaagagggtgtaggccatttgacaaagattagctgttacagctattgacatcatggcgtgtccctggtcacgaccgctctcctggttttgggctatctcttcaccgctacctagaggatcagggaaggtgccctgaatgagtttgccaatatatccgttacctgctccattgtagaagtagttcactatatagttcaccatttcgtcgtcttcattcaggataccgatagcaaggtatgaacacatatttaccaaatcccaattagaccaatagtgatcgctgcaagtaccttgatgacgtttcatgaagtcaaggtttttaggagcgaatacatctttcatccatttcttaaaggctgtcacatcattggccgcccaaccggcataagtttgcatgatttcacctgcattcgcaaaggtataaccttgcgcacctgcggcaagcatgtggttggaatcatttgaagtaacttctttgcaaaccttcacccaggcattcagaattttgatggaagtatcggcgtacttcgtatcacctgtcaatttccacaataatgataactgataggcagcggcggcatcacgcatcgcattgctgtagttttcattcgtccctgttcccgtagcatcaccacgcactatcttttcggtaggtgaaggggtgtaagtaacatttgtaaactgactgctcttcagcagattgaattcatcctttactgcctgtggtgcgcttccgttatcgagcattgtcttcacacgtgtaaagtcggcctcgttgaacatggcgcaaggatgagtataggtgtatttggcgaccacttcttcataaggcatctcccaactgtcgatatctgtcgttccgtcttcgatttcactggaacaggctgtgaagcctgttatcagtgagagacctaatgcgaatattaaattctttttcattgtgagtattctttagagttatattttagtttccggctgatatttcagcttcagcaaaggcttttgcttcggctatgctcttgaatgtgcgaatccagtaaaccgtatattgaccggtaggcaggttctcattgtaaatgtctgctaccttgatctggaaagtattggcttctaccataccattgcctaatgccgcattaattgatggtatatcataatatatcagattcgtattatcactcagaagttctcctacatgagctttgttgatatttccggatttagtgactagatctaatgtgtaagcaccaccttgcccgattccttttccgccgacaggcaatgtggaacgcatggcaagtatcggatagttggagaaatcaaggtttatggggacatttttgaaactcaagtccgcacgtctcatagtagcgttttgagcaccggctgtaaccaccattttaccattttctatcacatagcttgaataattctgtccgattttccagccatcgaaattattctggccatcccaaatgacccaaccgctttctacggttacagatacggaagccgtctgacctgttgccttacaagttgccgtaatagtagcagttccgaaacccttcggtgttacaacacccaaatctaccgtagcaatgttttcgtcacttgaagtccagtctactgaacctgtggtagcgttggccggtgtgtaagcaacatccagctgaaccgggccgcgagagatacaaagcggttctgtcaaagcagagatagagacactttctaccggaatgtactctttgatattcagctcataagaagcagatacaccactacggtcgtgtgtgtaagctgtaatgattgccttgcccggcgtcagacagtttaccaggccattttctgatactgtagcgatgcttgggttactgcttgcccatgtcagataagagtaggtatgattagccggaaggatggatgcctccaactgaattcggtctgtctcataaatatcttctccctctttcggattgaccaacgtcatatcggtagcctttatgatttcgggtattacattgaccgtcactgaggctgatggaccgaaacctatagcgggagtcacactaatgatagccgtaccttcggctataccggtaatagtaccttgttgcgaaactttggcaacagtttcatcggttgatttccagataatggaacgatcttccagttcttcgggagcatcaatcgcaaaaacaatagtagagtccatgccaatggcaagcggcaggttttcactgactttaaacgtgatgccgttaatcagtttggcttcgggcatggcaggagtaaattcttgatccttatcacatgcagtcagagtcatgcaggccgccagcatcccaatggatgcccggctcaagccttgatatatagaatttctattcttcatgttgttatcttctttttatgaatgaaaaacattgatttattctccccaacccgggttctgtttcaggttcgggttcaactgcaactggtcggtaggtaatgggtaaagatagtgcttatcttcccatttacgtcctgactccaggatgatgaaaccgtcgctgtttctttcattggtaacgcccggccatttgttctgaaactctgtacctgtccatctgatacccagaaaatcttgcggcatttccgtttcagctgtcttccaacgtttcaggtcgtctatacggaaaccttcgttgaataattcaatggtacgttcgcggcgaatttcagttctcatatccagatcgtgagtgctggcaaatgcattggttagtttaggcattttggcgttgatgcggcaacgaaccaagttgagagagagattcagatcttcgtcagagatagctccatcccgttcgaatacggcttctgcatagttcaacagaacttctgcgtagcggatgatggggtagtcgtagctttcataggtatcgttcacatagcgttcgcaagcccacttctgattgttataaccacttcctccggtgggtaccaatcctttgatggaagctgaggcgcggtcaacggcatcacctgtccagttaacgcgtgaattcaagttactccaaaaatattcataaggtttgcagagggtataaatcatacggttatctctgttcagatcttcgtccaaaatcttcaggtctcctttatatacttccgatttttcaatggggagtccatcctggcagagatacattgcagcaaatttgtgagagatcatttgggcatttgccaaacactcttttgtgatatttacaccgataggagccaacgcttcgtcgtgacggcgggagaaaatatactccgtattggcgcttttctgtaatccggcagggttacacttcgtatcttccaggataaacatatacttttgtgcactgtcgcctaagatagcaggtgcaaacagtgagaagtttttagtgttgatcacttcctttgctgcatttgccgcaatgtccaacaagtctttgccacgagctgtgttaccacggaacttttgccatgtgccttcgtagagtgctacacgggaaagcattgcccaggcgccttcgcgacctacacgtcctttttccactgtggaagtgacgggaagtaattcggcggcatctttcaaatcctgaatgatgaggtcggctacttcgctgcggtcgttgcgtgctgcttgcatttcgggagcagtaacatcaatcggtgtagtgactactatgacatttccaaaaagctgtaacaggtcaaagtagcagtaagcgcggaaaaacttggcttcaccgatatattgtgcgatgtcactctgatttgcaaaactctctgctttctgtaagaggatatttgtacgacggatgcggttgtaagcatcggtgtagttgccgtcggaagccggtatgctgttggttccgttagcaaatacattcttactgcctttatccatgataaggtcagaacgcttatcggagtggggggcatcgtagacgctgtttttaaaatcgcgtgtccagccatagaactgattggagaataacttgaagtctgtagcagtctgccaatagttaccatcggcaatctggtctttcggatccaggtcgagacaggaatgtaacatacatcctattgccagtatcaaaatagatttaattgtatattttttcatttttgtcttcaattaaaaggttaaattcaatccaaaagttacagtgcgcaggaaaggatatcgcttggagttgtccactttacgatttgcttccggatcccatccatcattaattttgctgtgttcccacaaatcgctacctgttacatatacgcgcgccttacttaatatttttgttttggcaagcagagaagccggaagtgaataacccagagttacatttttcaagcgcaaatatgctccgtcttctaccgaccatgaagagcattggtagttgtagttgttaagttcggactggttggtcagcgcagggaagaatgcacccggattatccggagaccatgtgttgcctatgtgctgatcgctcgtgttcagataaacggcacgcatcggaatcctccatgtactttcctcacgccagatagtacgtttgcctgctccctggaaaacgatggcaaggtcaaaaccattccactccagacctgcattgatagagaattgtactttaggatcgtctgtacccagatataccaaatcttcttctgtcagtttgccatccttattcacatcttcgaacatgttatcgccaaggcgcagattgttgagtgtaccgatggtactggtgtttttgtacttatccacatactttttcagttgttcttctgtctggatcttgccacagtaacggagaccgaatacagaattcagaggatatccttcacggtcggagcgtacacctgctttgatggctccactgccaccgttatccactaattcgttggtggtgtaggtaaaagtaccgccgatatgatagtttacttttccaatcttatccgaccagttgatcataccttcccaaccgtgtgccttgaatgcaccgtagtttgccgtgggagctttgtcacccagaatacccgggtagattacgtcgatcaacatattgtcactcttcttccagaagatttctgccgtacccgtcaggcggttgcgcaagaatccgaaatcaagaccaatattgtagttatggatgcgttcccatgtacggtcggtactcggcaacttaccgttagtatctacataagagatttttccattacctatcaatgcaccgccactgggggtgaagttgtataactgtgcaccgtcatagcggtcaacgccactctgattacctacgctaccgtaagaagctctcagctttagttcgtctacaaatgtcagattcttcatgaatgcttcttctgaaattctccatccggcagaagtaccccaatagaatacccaacggttttcgggctggaatttggaagaaccgtcgtaacgtccctgtgcttccaacatgtatttagaacgataattgtagttgatacgaccaaagtaagacattactgcctcttgccatttggttgatttgtcgtcaccgttcttcaggtaaacaacatcttttgtgctattaggaatttccaatgagggcagtataccttctgtatagaggaaagtgccttcatactcttttaggttatattgcgaccccaccatcacttttacatcgtgaacatcggcaaagatatgcgaccagtcgatgtgtccggacaatgagtaaaagtcggtacgtgaattggatttggaatacgaactcttgtcctcggtcggattgctgcgaaccacgcggtcacctgcatagttataccaatcaatagctttactttgtttatcacggatggctgtcgatgtattataaccggccgttactgaagcagtcagatctttcaggatggagtatctgaatgtctcgctgatgttgatagcagatactttcagtttgttgtcaccgcccaattcacaataccagttgggtgcgccccatgttccccatgcataaggcttgccattagcggtagcagatgggaaacccggttgctgtgagttggtggtcagtgccgaaccaatctgtgtaggtgccacttgatcctgacggttgtaggctatcactgactcaatagaagcgcggttggacagtttaaaggtatttgtcaagcgtagattataacgattattattgttgttaccccacttcaagttactgtcatcatacatatagcctaaagacaaacggtattttgaggcatccgaaccaccagctatagcaagttcgtgttgcgtggaagcagctgttccccacatgatatcctgccagttggtatcgaaaaatacaaagtctgctacgtctgtgaaggcattaccaaagggatttgttgtatggtcaagattgatatactgatttttatacgccaatgctagttttgcataacgcatccaggtatcatcgtcaccgtaaccgtcattggtacgtgcatctatcacggaggaagcccattgttccagactcatcagatgaggagacagaccgataaacttacttgttaccgaaccgctatagtctacctgcactttgcctgcctgggctttcttagtagttaccaatactacaccaccggcagctttgctaccgtagatggaagctgaagcatctttcaagaagttgatagattcaatatcagagggattcaacaaacgcaattcgtttacgctttcatattccacgccgtcgataatgactaatggactggtagtgttttttgaaactgcaccgcgcagactcatgttccagctttcatcgcccggggctgtagaattacgcgtgataatgacaccgggaacctgtccttgcaatgcttgtacaggactggacattgttcctttattctctaacatcttctgattcaccactgttaccgaaccagtcattgtagcttttttttgtgtgccgtaacccacaactaccacttcgtccagcatttccgaatcttctgccagaaccactttcagattggtttcatttccttttaccacaatctcctgtgacttatagcctataaatgaaaccactaaagtcccttttgcattactcagactgaaattaccgtcaatgtcggtaatgcaaccgttcgtggtgcctttcaccataatgttggcaccaatgatgggttcaccggtagcatccactacggtaccttttactgtaccggcctgcataatggcttgtacctcatttacattggcaaaagcctgctgcgggctacctacacagagcgcagatgccattgctgctgagaataaaattcttttcgatgagaatttcagaaattcattcttcataatttataaatttaaaattaacactattatttctattgtactctaattagatacattgtttcatatattcacgtatttctttccggctgataaacaaatggttttcgaccgtacggcgtgaaaggttcaatttggcggaaatttccgatgaggatttatcttcaaaacggctcatgatataaatctttcttcgttgttccggaagagtgcgcaatttgcgctcctcacaagccagtaaatcattggcaacaatctggttttccgtttcattggtacaggtcgttgcatgatcatatatataagatgttatttcttgcttcttatagtgacggcgcaggtaatcgttcaccagattgcgggatatggtgtaaatgaaaaactttacggtatccggacggagcatttgcttatagtccattaaacgcagaaatacatcttgggctatgtcttcagcttcctctttattgtttatcctataacatatatagagatagacggagcggtggtaactcgtataagagtcagctatcaattgaacggatgtcatctttttgttttccatgcttcagactttggttacgttttacgttagctttacgattgcaaatataaaaggtaaaaaacggaaaacaattttttatagtgcttaacaaatctcatctcattaacttagactgaaaactaattaatttgttgtaatatagtgacttaagaatttgagactcgtagtatcaactaataatttgagactccggaggtaagttggacagaatattcttgctgtttattgcaataaaaatgcacttatctttcgatattctgaaagataagtgcagaaaatgatggagtatatcttaaatgctatagattattcgtcgttattctttccgatgctccggatatattcattgggagtgatgccggtagccttcttgaaatagcggaagaaggaggcgcgtgagctaaaaccacagagttcggcaagtgctcccagtgtatatttggaatattcgtcttcgttgataagacgcttgaactcctcaatacggtaatcattgatgtaatcgtaataattacggttcagatgttgattgaacagataagataaagtatgtgctgacctgccgagcatggttgccagatcggcaattttcagatccgggttcgtatatggcttatcacgatgcatcagagcctccagcttttctgtcaggcgctgacattcttccgtgcttatcttattggtcttatatttcaattctactgtcttttcttgcttttcgggttcttgcacatcttccggaagctggatttgaatatttttcgtttgccttgcttttcttttccgctgatagtaaatatagccgataaaagctaaagcaatggaaacggcgatgatgctccacgtttctacaggataggcaatgtggacggcggtacgtacttcagaatctggatttccgatatagcgtagcttgaaaagatagtttccggatgacaaatcataataagtaatttccgactttccggtcaatatctgccagtcctcatcttcaccttccaatttgtattcataagtcatataagccggttcggtataggtaaaaccggagaagtgaaatgtcaggttattttgggaggattcaagttgtatttcagggacttttccactctcaacaacaggatgaagcgatttctttccgttgacgtaaatatctgtaatcgtcagcggataagtgtatcttttcatctgattattttgcttgaagttcatataaatcagccctttggaatttcccatccatatatttccctgttgatcctgtacgggagggcacagtgtgaaaatagaactgggaataccatcaatgaaattataaggaataaaagtttctttcttgtcgtagcggtagagtccgttattggttcctatccagagccatttttcgtcatcttccagaataaacataccatcttttccttccagttgtgtatcaggttgtagccttctgaaacggctcatggagagatcggatatacacatacttcctttgtccggcaggaaataaagattatggtcggagtcttcatatacaactctgatcttttctttatgaataaagttttccgggaagatgtcggttttcagactttcagaagaggggtcccagatgcacatgccattctctgtacaaatccatcctttatgtgtggagtcgaaatagatttcgtaaacattcccttcgggtaatttggagttggcactggtatattgcttgattcttttcccatccttataacaatagaggcccattgaggtacctatccacaattggtctttgttatccgcttttatactgaaaatctgtccccgcatgaaaggttgcggttcattaggttcgaagtcgtgaatagtaagatcagcaggattgaatatgtacatacccccgccataggttccgatataatatttatcctgaaatttatagatacagaagatcatactggaacgcaattcgggagatttaaagtttttgaagcgtcgttgctcttcgtttatgtagaataggccgtcgcgggagccgactaatttctcatgctcggtaattgcaatactgcgtacgggcatatctttggagtcaaaatacgggagataactgtaagtagagaaaagtccgctctggtacagactgtaatccaatcccagttgatagaaacctatccagataagcccgtcacgatccactaaaagggagtacacggagttggaacggatactttcgtcttttcccggttcgtggcgcaaagagcgtagaactttcatttgtttggtagaaatgaaatgtactccatttccatccgtacccacatacaacatatctttaccatcaccggacagcgaagatatcacattgcatcctacatcgatgaagggcctgaacttatgtgtttgtgtatcgaagctgataataccttggcccatagtacccagataaagtacgttgccgatgcgggtgatattgttgtaagagcaaaaatgtttgtcttctactatattatgataagaggcgattttcttgtcggcaagtgtcagggaataaagtccgtcattggtggctatccagagaatgccatcctcactaagacttagtccggtgatgatattagaggctgaaaggacattgggatctatgagcttttgttccaggttcccgtttttatagataaacagaccggcctcacttcctatatataaagtacctttcccatcaggtaggagcgtccggacgccatagtgtaaagtttcagcagcaatcggttcgagaatatctttttcggtatttacccgccaaagtcccatgccgtttcccatccatatctggttgccttccatttcggcgatagcattgactcgcttgattttttcattcgctccggaaatcaggaaatgtttcagacgtgtgccgtcaaaacgttccaaagaattgccggtacctatccaaacatagccaatggagtctttataaagtgcatttactactaagtcggaaagtccttcggtgacggacagtccccggaagacagaggggagcgaatagcccggaaggaagccaaacagcaggaatagcaagatgatatattttgatatgttcttcacaatatgatatctttcgtttctatgcattatgtttctgtacagcaaatataaggaaaaagaacgaaaatattcaggtttaggatgattattcggcagtcggggagtctttgctgatttattggcttgcggacaagggcgtatctgatccgtaccaagtccgtatctactccgtgtctatagctatggagcagctatggagctggtacggagtagatacggagatactatggagggggtacggagatgctacggaccatgtatggagatgatatggatttgatgctattgttttcacttcaattccatttccgctgtattggcttttagtttatacgtcttctttttgatactgatggcgcaatcggcggatgcagtgtagtaccatgcccctttcttgaattccagtaatatctctgcgggagtttccgccttgataactacattcggggtacttagcaaagtgccatgtcctaaaaagaaggtacagtcatcgccctttttatttccccataaagcataggtggcttgtgcactcatttttccactggtgcagatatccgtgggggtatctgatgacaggatataatctatacgtccatctttttgtacaacacatatgctggtggcactgttttccgttttactttttacttcggggaagcttacttcggcaatgcagccgggttcttttacggatgagggctcatagatagcgacgaatggtcggttccaggcttctcctttctggcgggctacaaatgtcagggtaggctgttcttttatattatatggcatccccggggtacggctcaaaccttccgtcatgggagacaaggcggtgaaaacttcccgatctgtttctcctttcatccacaagttcattgaaatgtcatccttgtcgggcatggcaatggtaaatgtagcttttatatctttgtcggtagtagctgactttttatcatagatataagaataagcataaaggtgagcaccggcaaaggccagttcttcggtgggttgcaaattcaagtctgtaccgtttgtgcctgtcagtgttagggtttgccccagattatggtagaaatagtcatgcattttatcaccaccacgttctttccggctgcggaaaatatctacataataaccggtttccggaccggtagtgacgatactcatcatgcgggtctggtcggcacgactttccggttcacggaaagaaacatcgctataggttacggaagtgaaagcttttcccggttcggaagaaacagggaaactggatttaagatcaaaggagtgattacttttcataaccgggtaactggaaatgccatccacgcaaaccgtgttatgactgggaaattgagaataatattccagatagtccagtccgctgtataagtaaaggccgattccggcatcgggagccagaacatatcccttaccataaagctccatggatatgccattggcatgcatgtggtttccttcactggcattcagagatatcataaggctgttacggggattcattccgtttcgttgtaccagccaggaaacgttcggtgcatagaagaagggagagacatattgttctatttttccggcttcgatattgggattcagttccaatggcttttcatcaaagaaagaactgatagaaacggggacactttttttgttgtctttggtttttcccgcatcaggatggaagcatttcagcatggcagtgaaatattcttcttgctctttcttgccgttgtgctgcgcgtttcgtatcatgcgggatataggattggtgttcagatatcccgggtgggtatcaccgaaaccacagatcatccggttagggaacaaatattgcggagtagcgactaccgctttagagagaaccggcattgctttcaccagatcataattcagattccggtcgaagagagtagcaaaactggtgtagtcattcagtactacattgctgtacccgggacattcggcccagatacctgttttcggatcgaagccataatcggctaatttagtcagactccattggcgaatactggaacggttgagtacataatcaatgtaatattcgcgccctttaccatcggcatattgcttgttgttttccagtatcataccgatattcataacatagcgagcctgcatcaggttccagttattgtgaggaacaccgtttgcaatgatattgtccgcccatttcttgaaagctcctgcgtatatatccatcttgtcggtatgccgggtattcaggtagtcatacaggaaatcgtaaaggggaacgatatcataaagaatatcttcgtggataacctcgaaagaactcattcctaccagcgtttgctgatggccgtggttgaggtcgataggaacattccggtaatagataccggtcatataggtatcgaatactccggcggcaagttttgcatatctttcttctccggtaagccagtaaaggaaggcggcatcacgggcgatacccatgatttcacggttcaggctttcgatgttgcggccggttttagatggatgtacactctccatagggcgaccgggcagggcattgttacaaaatgtcacatttccttcagcatcgtcatcgtatggcactacatcttccagacggggacgtccgtgggtggcgaatgtgccacgcgtaccggtatagcgaacggtgggtgccggtgctttttcgcctccggcatggtcgaaggtttcaccttttatatatacatccgtagcatgagacttccaatacatggcaaggcgcgaaagtaaccagtccggttgggcgtctgtcaggttagcataaagatcggttcgctttttcaatttctcaaatacgtcttttgcccaatcttctttttctatcagattcagggtttcactcttaccgttactgtctgtcaggtaacgtggatggctattcggcaattgctgctggaaggcgattttcacctcctgagcttgtaatatccctgaaaaaagaaggcatatcaataaactaagtgctttcatattctatcaataacattaggtgtttaaagaatatacggatgagggtggataattactcaacggaactatgtaaagatagcgcaaaactatgcaaaagatgtaatcattattacacttttttaaaaataaagcccctacttttgtgaaaaatactatttcctatgaagaaattgtcatttataaacaggtttttaccttcgtacaaatggaaagtggctgcgataataatctgcggtgttgtggtaggcgggggaggcttgttcatgtatttgctgcgggcgcatacctacttgggggatgagccgtcagcgtgcgtgaactgtcatattatggcaccttactatgctacatggttccacagttcacatagtcggggtgccacttgtaatgattgtcatgttcctcatgagaatgccgttaagaaatggacattcaaagggatggacggtatgaagcatgtagctgcttttttgacaaagagcgagccgcaggttatcagggcgcatgaagccagttcagaggtgattatgaataactgtattcgttgccatacgcagttgaatacggagtttgtgaaaactgggaaaatagattatatgatgtctcaggtaggcgagggtaaggcttgctgggattgtcaccgggatgtgccgcatggtggaagcaattcgttgtcatctactcccaatgcactggtaccttatcccgaatcgcccgttccggactggttgcaaaagatgcttaagaaataatgaaataaaatcaatatacttatggaaaagaaattgaagtcatggcaaggctggctgctgttcggtggttcgatggtagtcgtgtttgtattaggattatgtgtttccgcactgatggagaggcgggcggaattagaaagcgtgttcaataaccgcaggactgttattacaggcattgaagcccgtaatgaagtgttcaaaagtgatttcccccgtgaatatcagacttggacggaaacagcgaagacagatttccagagtgaattcaacggaaacattgcagtcgatgtattggagcaacgtcctgaaatggtagttctgtgggcaggatatgctttctcaaaggactattcgactccgcgtggccatatgcatgcgatagaggatattacggcaagtcttcgtacgggtgcacctgctactcccgaagatggcccgcaaccgtctacctgctggacatgtaagagtccggatgttccccgtatgatggaggctatcggtgtggatgcattctataataataagtggggagcaatgggtgatgagattgtaaatcctatcggatgtgccgattgccacgaaccggaaaatatgaacctgcacatcagccgtccggcattgatcgaggcttttgcacgccagggtaaggatattacgaaagctactccgcaggaaatgcgctcgctggtttgtgcgcagtgccacgtggaatattacttcaaaggtgatggtaagtacctgactttcccttgggataaaggatttactgtggaagagatggaggcttattatgataatgaaggtttctatgactatattcataaactgagccgtgctccgatattgaaagcgcagcatcctgattatgaaatctgtcagatgggtattcacggtcagagaggtgtgtcatgtgcagattgccacatgccttataagagcgaaggtggtgtgaaattcagcgatcaccatattcaaagcccgctggcgatgatagaccgcacttgtcagacttgccaccgcgaaagtgaagaaacactgcgtaacaatgtgtacgaacgtcaacgtaaggctaacgaaatacgtaaccgtttggaacaggaactcgctaaggctcatatcgaggcaaagtttgcatgggacaagggggctacggaagatcagatgaaagatgtacttgcccttatccgtcaggcgcagtggcgttgggatttcggtgtggcttctcacggtggttctttccatgctccgcaggaaatccaacgtatcctttcacatggactggataaggctatgcaggctcgtctggctgtatcaagagtattggctaagcatggttttacggatgatgtgccgatgccggatatttcaaccaaagagaaagcacaacaatacattggtctcgacatggatgcggaaagagctgctaaagagaaattcttgaaaacaactgtacctgcgtggctggaaaaagcgaaagctaacggtcgcctggcccagaaataaaacagagatatgtggatcagaccgtggggatttaaagaaggatgcctgataggcgcaggattgttggtgacaggatggctgctacagattacaatcggtgaaatagattggagtctgtttgcctatccggtgaacatcattgttctggttttatatatagccggaatagttgccatgcattgcctgcgcaaacgtgtctatttcttcggttggatgagtcattatacatcagctgtctcttctcttttatgggtggcgggcattacggtggtgatgggacttatccgtcagctcccttccgatcatccggcagatatgcttggcttttcgcgaatgctttcggcatggccttttgtattgctttatatctggatggtgactgtactggggttgaccacgcttcgtgccggatttccattcagatggaagaagcttgctttccttttgaatcatgccgggctgttcattgccttgattacggcaaccttgggaaatgccgatatgcagcggctgaaaatgactacccggatagataatgccgaatggcgtgcaatggatgagcacggtaaattgatagaacttccgctggccattgaactgaaagacttcacgattgacgagtatcctccgaaactgatgctgattgataatgaaacaggacgtacattgcctgagaaagcaccggaacatttgttgctggaagaaggtgtaacggatgggcaactgtccgattggctggtgactatccggcaaacgattccctgggcggcttctgtggctacggaagatacggtgaggtttaccgaattccattcgatgggagccacatatgccgtttatttgcaggctatcaatcaaaagacgaaaactgcaaaggagggctgggtaagttgcggtagttttattttcccatataaagcattgcgtctggattcgttgacaagccttatcatgccggaacgcgagccgcagcgttttgcttctacagtgaaagtttacacggaagacggcaaacaggtggaagatacgattgcagtgaaccatcctctgaatgtggccggatggaatatttatcaattgagttatgatgatacgaaagggcgttggagcgatatcagtgtgtttgaactggtacgtgatccgtggttgcctgctgtctatacgggtattatcatgatggtgctgggagctatctgtctgtttgttaacgcacaaaaaagaaaagaggaggacgctgaatgacgtgggattattttgtaccgttttcaattgccgccctgcacttctggggattcggtgcctttgccgcctggcgcggaagaaaaccgtatgttgttggcgggcttaccttgataggacttgctatcttcttttgctttattgtgggaatgtggatttctctggagcgtccgcctatgcgaaccatgggagagactcgcctgtggtactctttctttcttccactggcaggactcatcacatacagccgttggaggtataagtggatactcagtttcagttttattctgtcactggtatttatctgcatcaatatcttcaaaccggaaatacataacaaaactttgatgccggctttgcaaagcccgtggtttacgccgcatgtcatcgtatatatgtttgcctatgctatgctgggtgcggctaccgtgatggctatttatctgctttggttcaagaagaagccgattgacagccgggagatggacctatgcgataatctgacttctgtaggattggcattcatgacattaggcatgctgtcgggggctgtatgggcaaaagaggcgtggggacattactggtcgtgggacccgaaagagacatgggcggccgctacgtggttctcctatctgatttatatacatttccgccttggaaaacctttgttacaccgtaaggccttaattttacttctgatatcatttgttttgctgcaaatgtgctggtacggcataaactatctgccctctgcacagggagtcagcattcatacgtataatttaaactgataatcattatgaaaactacttattgggcaatgcttctcatgcttttgccaagcatggcgtatacgcaaacaacagaaaaagagaatgaatttacaatgtccatccagatcagacctcgtgcagaatatcgtaatggtgctctgatgccccgtaacgaaggagaggaacctgcaggattcatcaataaccgtgcacgactttctatggagtacaagcgttctgatttgcaaatgaaaatctcggctcagcatgtgggggtatggggacaagatccgcagattgacaagaatggacgtttcatcatgaatgaggcatgggctaaactgaatttcggtaaaaacttctttgcacaattaggtcgtcagaccctttcgtacgatgacgaacgaattttgggcggactggattggaacatagccggacgctatcatgatgcattgaaactgggatatgccgaccccaacaaccaattgcatcttatcctcgctttcaaccagaatgacgagactaagataggtggtacctattacgtgcaggtcggagcacagccttacaagaatatgcagacactctggtatcactataaatccgattatactccttttgatgcatccttactgttcatgaatctgggactggagaccggagatgcagcaacaaaagaatcccatacccgctatctgcaaacgatgggtacttatattacttataaggataatggctggaatgtggacggtgctttctactaccagatggggaagaacctgaatgcagaaaaggtatctgcctttatggcaagcctgcaggccgcttatgccattgacaagacctggaccgtagtggcaagtgccgattatctaagcggagacagcggtgacagtgacaagtacaaggcattcaatgttctgtatggcacacatcacaagttctacggagctatggattatttctacgcatccgattttaaaaacggatatgctcccgggttatttgacaaacgtctgggagtacgtttccgtgcttctgataaggtggatatggacttgaactaccaccatttctcaacagcggcgaaattgccgaatctgaagaaagcattaggttcggaagtcgattaccagattaactggtcggtgatgaaagatgtgaaactctctgccggatattccttcatgcgcggaacggaaaccatggatgtcgtgaaaggcggtaatcacaaaagctggcaagactggggatgggtttcagtaaatatcaatccgagagtattgtttgtgaagtggtaaagatagataaaagagaatacgtatggggagcttcctcatacgtatttttctaatgatggttcgtccagaacacggactgtctttccgtccatctctataattccttcttttatcattttattaatttccttcgatagtgcagggcgggttacattcagatattcggcaagggttgcctgattgtgaatgatgttgactgttgaagaattctttttcttgtgttccagcaagtagacaacgaaacgttcacgcactgtttttcgtgatagggttttcaggcgggatactgtgcagacattacaattgcccgtgatgcaaagaaagttgtgtaatattttaggttcctcgctgataagcttaaacatggactctttactggcagtgagtagggtactgtcttccatggcagtaaaggttgccggcagcactccgtctgaactgaataaatgaggagtagcgaatgcacgtgctgcaacgatatattctatcatgacttcatttcccaatccgtcaataatatctacccgtagttttccttctaacaatacatataacttcttgcagagtgttccctgggtggcaatgatatcttttttgtctaccgagtacagggagatatccaacctgtcgagcaatgaatgcttgatgttaaggggaaggtcacgaaacagcggaatctggaaaagtaattcctgatgtttgtcggttaatgttattttcctcattatattaggtagttggttgtacaaagatacgatgaaaaagtagaattaaaagtatttcttcgaattctcctcgtcaataaacatttcttttccttctatttgtatacaaccctcattgctcaattcagatatggcacgtgccaatgacggacgggctaccccaagtatatgtgccacttcctgttgggaaccaatgcctccatgcatctttacataattgagtaatctggatttcaggctttgtaaggcaaactcgttcagtttcttggatagaaacaagctccggtcggaaatcaacttcaggaaattctgcataatgatcgggtactggtgcatgaactccagaaaagcatctttattcagaatcaatacttccgaggtttccagggtttcgatattcaccgggaaacggttttcggaggcgaagatgaaagccggtgcaaggagtttcggagcatagagagtctctatggtgagttgttttccttctgcactgaccatttgcgtacgcactgttccattgcacagaatatagagagaacggtaaatatctccctgcatggcgataaactctcccgatttataagatttaagggtatgttggtgcaacagaatgaactttaacagcgtttcttctgttatgcctcgaaataatggcatctgtaataatatatgtggttccattcttttttaagttttttgtgattgggtgtaacatacgtgacaatttacctgctataaactctccatctttgcacaaagataatgcaaatgtattttatagatgcccgattacaattaatttatagtatggtaaatgataatttatcggcgagggaatgggtacgcggactacgcggataaggcggacgaacgcggactttaatcttttagacacggatgacgcggatttttaaagctgcgctatacataccggcatatcacaccgaaggaaaaaagaatccgcgtcatccgtgtcatccgtgtctgaaagattacttgcatgccgaaggagaaccttgctccagcgctacgctggtaaattatcatttatagaacaacctaattttgcatgagtatttaactaaataaaaagaataagatgatggaagctaaaatgttttgttatcagtgccaggaaacaatgaaaggcaccggttgtatcttgaaaggtgtgtgtggaaaagaaagtcatacagcaaaggcaatggatttgctgatgttcgtggtacgtggaatatcagtcgttactgatgaattccgtaacgccggacatcccgtagctgccgaagtgaaccgttttgttgtggatgccttgttctgtaccattacaaatgccaacttcgatgatgaaagtattctgaacagagtggataaaggtctgatattgcgtaaccgtttaatagaagaagccaaagaaaaaggtatttccttgcctgaaatcgacgaactgcaatggcagggtggacgtgatgagtatgcttccaaagcggaaagcgtaggtgtgctgcgtgagcccgacatagacctgcgctccctgaaagaattgatgacttatggtctgaaaggtatggcggcatatctggaacatgccatgcgtctgggatatgacgatgcttctatccatacttttatgcaacatgctttggccgccactgccacaaaatcactttcggcaggcgaatgggtgaagatggtgctccagaccggagaatacggtgtgaagactatggctttactggataaagcaaataccgaacgctatggcaatccggaaatgacaaaagtaaatatcggggtagggaagcgtccgggtattctgataagcggtcacgacctgaaagatatggaagaactattgaagcaaaccgaaggtacaggagtcgacgtgtacacacatagcgaaatgctacctgctcactattatcctgctttcaagaagtattcccgcttcgtaggcaactatggaaatgcctggtggaagcagcgtgaagagttcactactttcaatggtcctatcctgtttacaacaaactgtatcgtccctccgttggcagatgctgaatataaagaacgtatgtttacaacaaattccaccggatatcccggttgcaagtacattcaggcagatgccgaaggtagaaaagacttctccgaaattattgagatagccaagcaatgccagccgcctacggaaatagaacgtggagaaatcatcggtggctttgcccataatcaggtgttgcaactggcagataaagtggtggatgccgtgaagagcggtgctattcgtcgctttgtggttatggcaggttgcgacggacgtatgaagggacgtgattattataccgaatttgccaaggcgttgcctaaagatacagtcatcctgacagcaggttgtgccaagtatcgttacaataagttgcctctgggagatatcaacggcattccacgtgtactggatgcaggacagtgcaacgacagctattcattggcagtcattgcaatgaaactgaaagaagtgttcgagctgaatgatatcaacgaactcccgattgtgtataacattgcctggtacgagcagaaagccgttatcgtactgctggccttgttgagtctgggtgtgaagaaaatccatttagggcctacgctgcctgccttcctgtcgcccaatgtggcaaaggtcttggtagatactttccagataggtaccatcagtgatgtggaagatgacttgaagatgttccaattatcataaatggttaataaattctgaagtatattcggatggataattcccgcccctacgagttaatcatatcgtgattaatttgtaggggcgaattattattttagtagaattcttttgagtggtctttgagatttacaacttccaccccaatgtcttttcctgtatattccatagcttggcgtatagccccttattattgagtagttcctgatgcttaccttgttcagcaatgcgtccttcctccaacactatgatgttatctgcattcttgatcgtcttcaggcgatgggcaatcacgattaccgtacgtcctgcaatcaatgtattgatggcacgctgtacttccacttcattttccggatcgagtgaagccgttgcttcatccagaagtactacgggagcttctttcaatatagctcgtgcgatagaaatgcgctgcttctctccaccggacaaggtacaaccgccttcaccgacctgcgtatcatatcctttgggcaatcgcatgatgaaatcgtggcaacatgctttgcgggccgccgcttctatttcttcgtccgtagcatcggttttgccgaaacggatattgttgcgaatagtatcttgaaacagatacacatcctggaataccattgagatatggctcatcagcgattccggttccagggttttcatatctactccattaaataaaacctgtccctgttgcggatcgtaaaaacgtgcgcatagtttcagcatggtactttttccactgcccgaaggacctaccagagcggtgagtgtattcttgcgcagtgttactgatacatcatgcagtacctgttttttctgatagccgaacgatacgtgatagaaagtaatatcaccgctttccggagcttctttacttccttgcatttccggttcgttcatcagcgccaggatgcgccctccggcaatggagaaatatcggaattctgcaaagttggtcagtgccgaagtcagcggatcgaagacgcgggaaccgacaacgaggaacataacgaacgtgagcaaggataaatctcctcctattaataagtacgtaccacaaagtatcatcaacgtcagacctgcccgtatcaacgttacagaaagcagtatgaacgggccgagtaatgcttcctggcggatacaggcacggcgtagttcagcaaaggcattcttcagacggacaaacttgttgcccagcagattatatgctttcattacccgtattccctgcaagtactcttccaggcgattgcctgcattgattttggcggcaatctgtttgccgctcagtttgtattgcaggtaagtactgcccagcaatattcctacggcaagcggcagggctataaacatggcaacggccattcgccaatctatccatagcaagcctaggaaggcaagtacaggcatcaccagcgcacccattagctggggtaggtgatgtgaaatacctgtttccgccatggtaaagtctgtaatcagcatggacgaaagatcacccggatcgcggcgtgacaggaaacccaatgagagtttccgcaaatgttctgccaggctgacacgtcctgcggcactcatttcataggcaccccggaaattggcacggtaggaagccttttctgccaatgccatgacaaatacatacactacaagcaggataaaaatagtccagagccgttgagtgtccagtggcattccactgccatcgaaagcacggaatatcacgttgatagcttcgatagacaggcagaacgggataatatttatcaggttggcaagcatcgtgtagcccacaggtttgcgaaggcgttcggtgtgccctatcgtaatattttctattgcattcattcttttacctccttcttactgtttagttcccagcggaacgcatccgtataagcgtcccacatattcttatataatccttccgttttacttaatacctcgtgtttcccatgctgcacgagctttccttcgttcagtacgatgatttgctgtgccgaaatgatggatgagagacggtgtgcaatgatgataaccgtcttattctggatcagatgttgcaaggcctgctgcatcttatattcattttcgggatcggcaaaagcagtcgcctcgtccagtaccaggataggggcatttttcaggatggcccttgccacacaaacacgttgcgactcgccaccggaaaggtagacgccctcatctccgatacgggtttcataaccttgcggaaggctttctataaactcatggcactgtgcggcttttgcggcagctaccacttcctcgcgtcctgcactagagtttcctacccggatattctcatagagggtatcaaagaaaaggaagctatcctggaaaacaaaggaaacaatgtccatcaacttttcagtgggaatatctttgatgttgactcctccgatccgtatttcgccttccgttacatcccagaagcggggaatcagattggctactgtagactttccggaacccgaaggacctacgagtgccgtaatttcaccttggtgtgctgtgaaggtgatgtcgcgcagcgcttcggtacgggttgtctccgctttattctcataagcgaaactaaccttgcggaattcgatgtcataaccagcgggtacttgcggcgtttgtgcttctggtacgggcgactcggcaaaaatacgatcaatacgttctacgccctcgtctatttcccgtgtgcccgatccgaggaacatcagtttataaataggggaggctactccggggcccataataataaagaatagatagacagcggctaatgctagattttgtggctcatggctcagtaatagtaaacctatcggcagaatgaatgtaataagtgagttcagtaatatggtgaagaccatcataccgggttcgtatgtatcgcatactttcagtgcatattccttatacgcctcaatctcactattgaaacggcggaatgaccggacgctctgaccgaagatttttaccaccggcataccgcgtacatattgtacggctgaggcgctcattcgttcctgtgtatcaaagtagattttagtaaactcctgtgcctttttcccgaagaagttggcaaactgtaatcctatactcaatacgatacagaatagacagatcgctgccatccatccattcagggagaagaagataataaacatcagagtgaccgtagccaatacattcacaaggtcggggatggtatgggcaatgaagttttcaatcttttctacattctgttccataattttcttgatgcttccggtagatgtaccgttcaggtatcctaacgataagcgtccaatgtgttccgatagcttgatacgcagtccgtataggatacggaaagctgctacatgtgaggccatcagtgccgcataaagtagtaataatcctccgatcagtccgaagaaggcaaaccatccccaatatatcagtatcccgctatctattttttctaagtcactggcgtgaagcagtaactcctgcaatacgcggtataccgaccagtagggaaccaacatgcacgtagcacttcctgccgacaagataccggccaggagcagcaaccctttccgctcgcctgcaatctcaaacaggcgggcgattccttttttctttttcagtttctctttcataatcattatacttttaaaaacgaacaatattcagattcattcaaaaaaagagagagcttatattttcataagctctctccaaccagttacttcgaatgtgatgtattctgtgactatctgttccaaatcttctgtcccgactcgatgcatgatcaattcctcaaacatggtgaacatccatgccgtgtgcaggtggatagaaaagtcggttacattgatattcatttgcggatgtttttctttcatatctctgaaatactctttcacaagtgatgtggagcgttcggtgaagttctccttgaagttttccagtgaagaaccctgtgcatggaaaaatagcaataccaacaatttgcgatgcttttgtatcaatgtcatgtactcttctatcacatatcgtaggtattctgtggaatacatctccatgatatctgctccataacgcccgtgatgttcgtgcagcatcctttcgaatgcactgattacgggccgtaccaccgtacagaaaatatcatccttgtttttgaaatagttatagatattgctcaaccctacctgtgcttcttgcgcaatttcgcgcatggaagccttcggaaagccgttttcgaggaatactttttcggcagctttcaaaatttctttttgtatgtcatctttagggtattgcataagttttatttctcgactgcaaagtaggggagaatccgcgttttctgaaatacccattaatgatggttttttgttagatttttataaaaatcacaattattgggtattgccaaggtcactgaaagcatgcaactttgcgcgtataatctaactataaactactatatggtgaaactaaccaatcataaaaaggcaactgccagacctttaagttgtaagagatggggaataatagctattattattctttttgcaggtagcttatcttttttactgtactcttacttttctcatgacgctgataatcctcagtgtaactgtttgctatgtatgcttaatcatgttcctgaagagggagagtacatttataaccgctatttgatatttattagttttatctggattgctgtgatctttgcggctgtctttttagtgaattactgctttgtaaaaaagaacaaaaagaaatagtgttcgtttaagtacctacttgttattatttttaataacacaatactcatatttgggtattgcccgcctttttaactccctctacctttgcgccaacaaaatttaagataaaagatgagaaaattaacttgcttattcgccttaggtttcttgctttttaacaatactttacgggctaatgaacctgaaaaagtaacctcaacagaagaggtatctgaaactacggcaaagaaagagagaataaaacaggtaacaaaagatgacgactacgaaaagttccgtttcggtggatacggagagatggtagcaaagtttatgaactacggtacgaatcgtttctatggtggggtcgataacagtgatcaccgcaataccattgcaattcctcgttttgtgttggcttttgactacaagtttaattccaagtggatactgggtgctgaaatagaatttgaagcaggaggtgtaggtattgaaacagaacttgagaattcagaaaacggtgagtatgaaacagaaatggaaaagggtggagaagttgctcttgagcagtttcacattacccgtctgatacattcggctttcaatgttcgtgcaggtcatttgattgtacctatgggattgaccaatgcacaccatgagcctatcaacttctttggaacatctcgtcctgagggtgaaaccacaattattccttctacctggcatgagacaggattggaattcttcggttcttttggtaaaggatatgcgcgctttgattatcaggcaatgattgttgccggcttgaatgctgatggatttggtcgtgataattgggttgctggtggtaagcagggactctttgaacaagataactttacttcgcctgcttatgtagcacgtctggactataaaggggtaccggggctgcgtgtaggtgctgccttttactattgtaatgacgtgacagccaatgctgataagaattataagtatagcagtgtaggtcgctcatcagtgaaaatctactctgccgatgcacagtataaaaataaatatgttaccgctcgtggtaatatcatttatggtgatttagagaattcttccaaggtcagcaaggttactctttccaataactccaattattatcacggtgctatgcgtaatgtagctaagaatgccctgtgctatggcttggaggctggtctcaacttgagtgctttcttctcacagaagaaatgtccggttatttatccttatgcccgttatgaatactacaatccgcaggaagaggcagaaggttctgccacaatggagaaacgctgccaggtaagcaaatggacggcaggagttaactggtttgcattgccgaatctggttgtgaaagccgattatactacccgtcatattggtacgaacaaggtatttggatcgactaaatataacaatgaaaatgaatttgctatcggcatagcttatgtcggttggtttaccaagagatagttcaaataggtatttataattaatttaatgtttaagtaatatgaaaaagtttttttatttgtcggctctttcattgggcatgatgtgttctattacggcttgtagtgatgatgacactacgactatagacgctaagaatcttgactatacggcagagaatgcaagtagttggggaaattacatgcgagtagttgcacaattgttggtgaatgatgctactgctctttatgatgactgggcggttaaatacaacgaaggtggaagctatgcagatttctttaagaatcaagatgctttgacgagtgttgagcagttgattgatggttgtgtagacattgccaatgaagtaggtactgccaaaattggtgacccttacgatcttttcatacataataatgaagaaaaggctttgtatgctgtagagtcatggtacagctggcattctcgtgaagactatcgtaacaatatctattctattcgtaatgcttattacggaacacgtacaggagttattggcgagtcatctctctcaaaagcagtagctgcggtaaatgctagtcttgatactgaagtgcaaaatgcgattaagggtgcggcaacagcaatttgggatatcccgagtcctttccgcaacaatatcgatagcccggaggctgtaagtgctatggaagcttgtgctactttagagggagtactcaagggaagtttgaagaattgtatcgaaagtattgataaaacagtgttggcggaagtcgtaagaaattatgtggataaagttgtattacctacatattctgatttgaagacgggaaatcaggctcttttcgatgctgttgaggcattccgtacttctcccagtaatgctaactttaaggcttgtgccaatgcatggcttacggctcgtgaaccgtgggaaacaagtgaggcatttctttttggtccggttgccgacaaaggtcttgaccccaatatggatagctggccactcgatcaggatggcatcgtacagattttgacttccggtaactattcagacttaaactgggatggtgactatgatgaagaagatgataaaattgccggtgcacaagctttgcgtggttaccacactttggaatatttgatcttcaaagatggtgaagcccgtaccattcagtaagatttttacttgttagaaataagattttgcggaaacagcgggataatgaatattctgttgtttccgcaacatctgcgttaaaaagataaatgttagttacgtattttgcaataataattcaataacgaatgaatggcttattaaaatactcatttccaatctgtttttcgcttctggcattgttcgcttgcgaaaatgatggaattgatgtggatgatatagaagtacctgccggctttgccctctctgccggtactgctaccaacttcctgacttcctcttatgcttatgacaggtctgctgactggataacaggagcatacgataaacgtttcacccgtggtgacaaattgtatgatgatatccgcaccagtagtaatggaataggtggaggactgggaccggtttatgccggttattcttgtggtagctgtcaccgaaatgccggacgtacgcaacctactttgtggagcgaaggtggttccggtagctccggtttttcgtctatgttggtttatattagtcgtaagaatggggctttctttcaggattatggacgtgtgcttcatgatcaggctatttatggtgtgaagcccgagggaaaactgaaagtggaatatacctatgagactttccaattccctgatggtgagacgtatgaactctgcaaacccaattattctatttatgaatggtatgcggacagcatcaaacccgaagacctgttctgtacggtgcgtattcctttgcgccacgtaggtatgggacaaatgatggcgctcgatcccactgaaattgaagctttggctgctaaaagcaattatccggaatatggtatcagtggccgttgcaattacatctccgagagaggagtgagaagtttaggcttgtccggtaataaagcacagcatgccgacctgacagtggaacttggtttctccagcgatatgggagttacgaacagccgctatcccgaagaaatctgtgaaggacaggcacaagtaaatcaaggcagtatgatgggactttcttatgcccaattggatgtatctacagaagagatggagaatgtagacctctacatgcagagccttagtgttccggcacgtcgcaatgtgaataatgaacaagtgatcaagggtgagcagaatttttataaggcgaagtgccatctctgtcatgtaaccaccttgcacacaaaaccacgtgggtctgtactgttgaatggaactcgtcttccctggctgggtagtcagacaattcatccatactcggacttcctgcttcatgacatgggctctgaaattatgggcgtaggactgaatgacaactatgtaagcggtttggcccgtggcaacgaatggcgtacgactccgctttggggtatcggattgcaggaaactgtgaatggtcatacttacttcctgcatgatgggcgcgctcgtaactatgttgaggctatcatgtggcacgggggtgaaggtgaagcatcgaagaatctcttcaaaaagatgagtaaagaagatcgtgatgctttgatcgcattcctgaaatcattataaaacaaataacgaacaataaaaccaataagtattatataagcaattatgaagaaattaattttaatggttgtaatggctgccctttcgttggctgctatggcacagcatgaagaagatacagaaaacggtgtagtgtcacttgccggaagagagggatttacgatagaaaccaagaagggagactttgtattcaagccctacctgttggtacagacttgtgcaaatttcaattggtatgatgatgaaggtttggataaagcgtacaatcaggataatgtagctaattccggtttctcaattccctatgctgtattaggcttcaccggtaaagcttttggtaaagtagcctttaatctttctatcaatgcggctgccagtgggggagcattgcttcaacaagcatggttcgatgtacaacttaaaaaacagtttgccgtgcgtgtcggtaaattcaaaacacctttctcgcatgcttatctgacaacgttgggtgaaacattgttgccgcagttgccggtatcattgacttctgccgtcattctaccttattctttgaatgcggtaacgcctaacatcggtaccggttttgaccttggtgttgaaattcacggattggtagctgataaatttggctatgaagtaggtttattcaatggcaccggttcttctgtaaatacagctacaaaaactttgagtgatgattggcatatcccttctttactgtatgcgggacgctttacttatatgcctaaaggtgtgatgccgtccactcaaggtaatcccaaccgtttgaatgaagataagatcatgttcggtgtatcggcttcaatcaatgtggaaagtgagaatgaaagtaccaatgatacccgtgtgggagtggaatttgccatgttaaagaacaaactatatctgggtgctgaagcatattatatgaatgtaggtttcacggatcgccagaagatcaatgaaagctacaattatttgggtggttatgtacagggcggctactttgttgctccccgtttgcaggctgccttgcgttatgacttctttaaccgtaacggtaccggcgatgacggatttttgaatatgccggctgtgggtatgaattatttctttaagggttgtaacctgaaactccaagctatgtaccagtatattgcccgtacgggtcacgatacacagctcgaccgcgataatgataatttaggtctggccacacattctgcaacagtaatgctgcaatatactttctaaaaaaacaaagagagtcgttatgaagaaatgtatattattctttgctgctatctggatgacactctgcttctgttcatgtgatgatggaagaatctatgagaaggaggtcaatatacagcgtggtggacgtgctatgaagttgacaggtcgtttcagtggcatcagcaattggacggatgattatagtgtcgtagtggcaggcttcaatgataaaagtgaatacgccgttataacgaaatcactaccagtcaatgtagccgacggaacagatatcgttatgacactgggaggtatcagtgatgatgtgaaatcactcaaattgtgtgttatcagtcgtttgcgcgaatgcattgttgaatttaagacgatggaagacgaagaactcacagccgtcacagataccatattaatggatgtgggaacactggacgtgggtatgttcagttccatccagtcacaggttttcgataaaagatgtgtagcgtgccatgggcagaccggttctgcatcgggtaatttatttctgacggagggtaagagctatcatgcgttggtcaaccagccggcgcataagaatagtgatatactattggtgaaacccggcagtgcagaagagagttttctacatctggtcttgaacagggctggtgatacgagtatgaaccataccgatatgctgtcagaagatgagcaacccttattgaaactgatagataattggataaacgaaggtatttttttgaataacgagtaaatgatattggaaatgaacaacaaaaaacaacaaaccaaccaatcagagaatacattaaccgagatttttaaatatgaagtaaaagaaggcgtttcagagtttcatgtaatgattcactctacccggccggaagacacttatgaagaacaattaaatgcagtggccaatgcctacaacgatttgcttgcaggtgaattgaaaggtgccatggctgtgtttaaacgttatttcctgagtgataccgccaatcaggctgacctcctgctggctatcactaccgaaagttccgactgtgctctttccgtggtagagcagccccctttggatgggacgaaaatagctttgtgggcttatttacagaccgatatacagacacaagtgctgcacaacggactgtttgaagtaaaacacaatgcgtatcgccacctgtggggaggtagtgctttcaatcgtgctgctaattctgaataccagacccgtttgttgctgaatgactacgtgatgcagcttatggaacaaggatgtaaattggcggataactgtatccgtacctggttcttcgtacagaatgtggatgtgaattatgctggtgtggtaaaggcacgtaatgaggtgtttgttactcagaatctgacggaaaaaacacactatattgccagtacaggtatcggcggacgtcatgctgatcctaaagtattggtgcaaatggatacctatgctgtggcaggcttaaagccggaacagatacactttctttatgctcctacgcatctgaatcctacttatgagtatggtgtcagctttgaacgcggaacgtatgtcgattacggtgaccggcgtcaagtgtttatttctggtacggcaagtatcaacaataaaggagaagtggtataccccggcgacatccgcaggcagacggaacggatgtgggaaaatgtagaagccttgctgaaagaggctgagtgtacatttgatgacttgggacatatgattgtttacctgcgtgacattgcagactatgcagttgtgaagagtatgtatgacaagcgtttcccggatactccaaaagtatttgtacatgcgcctgtatgccgtcccggatggttgatcgaaatggaatgtatgggagttaaggctttgaagaataaggaatatgcacctttttaatttgaagaaaagtctcgtcttcttatatatctgtctggtggctttgctcgctgcggtgacctttgtggagcatgtacatggaacagagtttgtagaaaagtatgtttatcatacagtttggttttgttgtttgtggggagtacttgccgcattggcagttgccgtgttggttaagcggcagttgtggcggcgtctcccgacattgttgttgcatggctccttcctcgttatcttggtgggagccatgattacattttcatacagcaaaaaaggatatatgcatctcacagtaggtactgaggtgggaactttcatagaccaagacagtaagcgggtaatcgaactaccgttcaccctatgtttagacagttttcgggtggagtattatccggggacggatgctccggcagattacgttagctatattcgggatgcggaacctgtttccatgaatcgtatcctctctcgtcaggggtatcgcttttaccagtcttcttttgatgatgataaagaagggagttggttgtcggtgaattatgatccgtggggaatagggattacgtatgcaggatatattttgctgggtatctccatgttgtggatgcttatcggtcgcagtggggaattccgtagattgctcaggcatccgttgcttcgaaaagggggaatgtttgtgtggttgctcatggttacgggagcggcgatgcaagctgaaaacagaagtcttccggcacttgcactcagacaggcggatagcctggcatccaaacaagtgatttatcatgatcgcgtagtaccttttaatactcttgcacgagactttgtattgaaactgaccgggaaatcttcttatggtggcatgacacccgaacaggttgtcggaggttggttacttcgtccggaggtttggcagaatgaaccgatgatttatataaagaatgctgaacttcgtcatttactccgattgccttcttcctatgcctgtcttactgatttgtttgatggacaaaactatcgcttgcaggaattttggaaaggaggacaaaagccacacatgaaaatgacttcgttggaaaaggctatcatggaaacggatgaaaaggtgggattgatactgatgctacggagtggaacacttatccgtcctttaccggaagatgggagtataaaaccactgtctgacgtaaaagtgcaggctgaaatattgtacaatcgcattccatttagcaaactgttgttcatgttcaatctgactgtagggatgttggcatttttctatctgctttattgcagcatgcatcgttcggcaggtaaggcatggagcgtttttacagttgcactttatgcggcattcctttttcaactctttggctactgtttgcggtggtatattggcgggcgtattccgttgagtaatggatatgaaaccatgcagtttatggcactgtgtacacttctgcttgcatgcatattccggcgtcgcttctcttttacgttgccttttggactgcttatttcgggttttgctttgttggtagcttatcttgggcagaacaatcctcagatcactcctttgatgcctgtgttgctgtctccttggttaagtatccatgtttctctgattatggtatcttatgcattgtttgcctttatgatgctaaatggattactggcattctgcataggaggctggcgaaaaaaggcaatcgattcggagattcaggaacagcgtaaggttcgtgtggagcaattgatgcttttcagtcggttgatgctctatccggcagtattttgtctgggggcgggaatttttattggtgctgtgtgggcaaatgtttcatgggggcgctattgggcctgggacccgaaagaagtctgggctttgatcacctttttaatctatggtgcggcattccacggacaatcgcttgccgtcttccggcaaccccggttcttccatgcttatatggtgttggctttccttacggtgctgatgacttacttcggagtaaattatctactgggtggtatgcatagctatgcctgattatctttctattttcggatgatataataaaaatgcctacggaatccgcaggcattttttacaaaaacaactaactaaacacatgcaaagttaatcaagcgcaccggacttttctttcacagtaccgttcgcattgcgcacatatatcataacctaacattgccccgagtatgaaatcttcttcgggagacagcttgttcagtggctgccttaccaaaagacggattgcttcgatgcattccttgcgtccaaagaaaagattgatcctaccgtttcctaccggctggataacatagcttatcttttggtctgtcaggcgtttcacggcaaaagcttcatacttcttgtttgtagtataaagtaccatctggcgtactcctttcttaaattcgtagatgtggttcaggaatactttcaattctaccgggttaatgtcagatattgtcataaggctatggaataagagaaaattatgccaagtgattttttatgtcgctcacccaagcgtcgatacgttcttccgtcttatcactttcgttgatgtcatcaagagcgagtccgacaaacataccgtcgatgacggcaatagaggaggagaaagaataatcttttgcagataccttaccaacgatggtacaaccggaatccttgatatcttcgtatatgatacccataccatcgcagaatgtatcgcaataagactcagcatcaccacaaccgaacagggcaattgttttttctttcaggtctgattctttcaacactttaacgccatcataccagtcatcctgcaattcaccgtcaccccaggtggaagttcctaaaagaagagcttcgtattcctttactatgtcggcattcattttgctgacatcgattacgtcagatgcgggaacaccaagtttagaagcgattgtttcggcaatgccttgtgtagttccggttgaggaaccataaaatattcctattttcttcatactataaaatggtttaatttgtacggttgcaaagtaacggcatcagaggggtttatgaaatacccacaaataatgaaatgtttctttgtagctaaccacttataggtatgactgaaaacaaatgataatccattaagaaatatagaagttttatctatctttgctgatggatactaaaaataaatcgattatgaacactttagaattggaagcttataaagcggcattagctagagaagtgttgaacatcaataaccaagaggtgctcgatacaataaaagatattatacagagaagtggaaatctgaccaatgctccttatcagataggtgtcaaagaggcccgaaaacagttgcaggactccgaaaagcgctttgatgaaggggaatacgtgagtgaagaggaaatggaagagttttataatgcactgcaataatgaaaatacaatacgactgatattttaaaagattatccgataggagtctgtgaagaagcacctccttatggaaatatataattatttacggtttttcttcaaatcaggcaaaaaccaggtaaccaatccgagtaacggcatataagcgcagacattataaacagcttcgatgccgaacttatccgccatatttcccaatacagccgaggcaatacctgccactccgaaagcaaatccgaagaataatccggagatcagtcccagtttactgggtaataattcctgcgcatataacagtatggcggggaaagcagatgaaagaatcaggccgacacagaaactcataataattgtggcaagcaagccgacatgaggcatcagcatactgaaaggtgcagcaccgaggatggaaccccagatgacgtactttcttccgatacgatctccgataggaccacccatcagtgttccgatggctgtagccacaagaaacacaaagagataaagctgggagtcctgcacacttactccgaatttatcaatcagatagaaggtgtaatagctgcttaaacttgccatataaatatatttggagaagataagtatcagcaggatagaaatggaaagaaccgttttccccataggcaaaggcatctgcatatgaggttgcagggcaatatgatcacgtttcatccgggtaatgtatcctttgtaccatttgccgacaggtatcattaccatgattgctatcactgataaaattgcgaataatgcgatgttgtgcctaccataaggtgctacaattaaagctaccagtaacggacccaatgatcctcccaggtttccacccacctgaaacagggattgtgccaatcctcttctgcctccggaggcgagcgaagtgatgcgggatgcttccgggtgaagtacggaagaacctatacctatgatgaacactgagaataatacccaataaagattcgtggaaaaggccagattcaacatccccgtcatagtgaacaacatacccatcggtagtgtccaggcaaacgggcgcttatcaaaaaataatccgaatacgggttggaataccgatgcggacatctgataaaccagcgtaatcaatccgatttgtgcaaaactcaatgtcaagtcctctttgaaaagcggatatgtggcggttatgacggattgcaataagtcgttcagacaatgggaaatacttaatgcgatcaatatcggataagctatcgagcttaccgggcgttgtgtattctgttgcatgatggttgcgtctctaatgtaaatcgggcgcaaaggtacaaaataaaatgattaatacggatgagtaaaccaaaagcatgaaccttctccttcggttgattccactccgatttttcctcccatctgagatactaaacttttgcagatggaaagtccgagaccggtaccctgtacaaaggtattgagtttcacaaaccgttcgaatatgctatcaattttctctttgggaatcccgaaacctgtatcacgtacatagaattttatttcgtgaggtgccgtctgttcatatcctaaagcgatagtgccttgtttcgtaaacttcaatgcattgtttatgaaattggttatgacctgcatgaatcggttcttgtctgtataaatatggcaatcgggcatatacttctcaaagaccagatccacagtttccggcactttcatctccatcgatttgatgattttcatgcagctttcgtttacatccaggtcagaacgtacgaagtcgaatgttccggactctatcttcgaaagatcgagaatatcagaaaccagttgcagaagcaattcattatttgtttctactattttgatatattcctggcgttcttccctgtcgtctgtttctgccagcagactggaaaaaccaacgatagaattgagcggagtacgtatttcatgactcatattggcaaggaaagcagatttcaagcggtccagttcttcggctttgtcacgggcaatgatcagcttctgttctgtctctttcaagggagtgatatcatagttgatacacagcatttcaataactccatcctgaggacgataatccctgaccattacgtttatactggtccacgaatattttccgttacctctgttgatgcgtacttctttacttaaactagtggctttcccttctttaacctgacctacaaactgtttcagaacagcgcaatcttccgggtgaacatgagaatacactccgataacctgaggcatgggagtattttctttttcacccaaattcctgtaccatgtattctgggcatacccgtctcttgtcattatattaaaatgagcaaaccctactttggcatagtcacctattaagaggaacagatgctcaaactcttgtattttggtgtatgcactggtggtttctgttgtatctatattgataaacaggtaattgctgaattgattctgcgaatcgtaaagcagagccactttggtctgaagattgataacatcttttcttctacttgtgacgtatcggtcgattttagaaaagtcataattaatagagaagtccacattttctctggcacgcaatttttctttcacgtcttcggggatattgggattttcaaacagtgatacccccaatgcttccttcatatccgccaagccgaatatttcaagttctttatcattcatatctaccagatacccgtctttgtcgtaaagctcgatacctaccggcagattcttataaatattacgaagaattttctcactgtgatccaatgcgtggcgatcctctttagcctgaagttccgctttacgtaattggaggcaaatgctgatgatgtttcctaaagaagaaaaccattgatggtcgatgttactccagctgcggtgtgttctgaccatatcgatgcccatatatccccataccttatctttcgataggagaggaaccaccattaccgatttaatgtcttgcacctctagggtatcacggtaaacttttgcttcgggaggcatatcatccaatgtattcagaatgattgatctcttttctgagatttggcgatcccaccagagagaatcatcccaaggtacatcttgcaggaaatccagttcctgggatattccttcggctgttgcttcgtaaatgcaactttgtactttatgttcccggtctatttcgaatatataggtacggtctcctttggtttgtttgagtagatctgccaatattttattgatgatctgtgtaatatcatccgattgaagaaaagcgagcaatgaataagaaaggctgttttgttgataaagcaggctgtttacctgaagagagtctgtgctttcactcatttctccagcctgtttgtctatacattgcagatatcctatcatatttttgtaaccctcttcgtccggttgtttgaagctgattttagaatacacccatatatccccatcttttgcccggatggggaacatttgttcataggtttctatgtttgtgagcgaaaagtattcattcctgagtcgcctccgatgatcctcccgtattctttcatgaaaatcttcgaaactgatccggtcgctttcaagtccgagtaagtcaattataaagtctgaacaaatatattggcgattcttcaggtccgattcccaccaacccattttagccatttgcgcaatctggcgatatttctcacagtcaatatttggcttctctttcatatatctttttgctcctgttttctatcctttattaaaatctcagtgggcaaatatagagataacttttatattttgaggaatttgttgtcaaaagaatgttattgcttgcagtatggtacttataaagggctttgggggaaccgttgaaggaaggaggaggatgagtacaaaataggcggtttttcgtctttggtataggaatgaataagactcaccacagattacacagattcacacagatttattattctaataatcagtaaaatagaatctgtgtcaatctgtgtaatctgtggtgaattaattcataaccatacagaaatgaataaataaactccttacttatataaataattaagataagaatgaaaactccgtttaaattccaaatattcatagcatccttactgttgtggatcgttgccaaccctacctccgctcaacagatacgttcacttcacgaacaatttcttcatccttcagaagaggcaaaaccctggacgttctggtattggatgtatggtgccgtatcaaaagaagggattactgccgatttggaggctatgaagcaagctgggctgggaggtacgtatctgatgccgattaagggaattaatgaaggagcgcaatataatggaaaagcacaacaattgacacctgaatggtgggagatggtgcgtttcagtatggaagaagccaatcgtttgggattaaagttgggtatgcatatctgtgatggttttgcattagccggtggcccttggatcagtccggaggaatctatgcagaaggtggtatggagtgacacaatcgttgagggggggaaactcaaggcgctccgtctgccacagcccgaggcctatgaaggtttttatgaagatatctctctgtttgctttgcccataaaggaagtaccggatgagatgccggcccgaataacatgtgtcaatatagctatggaagagcatgctgattctcccaaagcggtgaatatggatgctgccggtgtgatccgttcttcatatccttgttatatccagtatgaatacgagcgtccttttacctgtcgtaacgttgaagtgattctgagtggtaataactatcaggcgcatcgactgaaagtgatggcaagtgatgacggagtgaattttcatttggtgaaacagttggtacctgcccgtcagggatggcagaatacagatgagaattcaacgcatgccattcctgcaactaccgctcgctatttccgcttctattggactcctgaagggagtgagccgggaagtgaggatatggatgcagccaagtggaaacctaatttgaagataaagcagctgcgactgcaccgggaagcccggttgaatcagtgggaagggaaagccggactggtatggcgtgttgcctcggctacgaaagaagcggaagtcggaaagaaagattgctattccctttcacagattatcaatctgaccgatcaatgtaaagcgggtatattgacaactactcttcccaagggaaaatggaaattattgcgtatggggcatactgccaccggacataccaatgcgactgccggagggggaaaggggttggaatgtgataagttcagtgcgaaaacagtgcgtaaacagttcgacaactggtttgcacaggcatttctaaagacagattcagacgttgcacgctgtgtattgaagtacatgcatgtggatagctgggaatgtggcagtcagaattggagtgatacgtttgcagctgaattccggaaacgtcgcggatacgacctgatgccttatttaccgttactggcgggtattccgatggaaagtgtagaacggagtgaagagattctgagggatgttcgtactactatatccgagcttgttgttgatgtcttttataaagtattggcggattgtgctaaagaatatgattgtcagttctcggcagaatgtgtagctcccacgatggtgagcgatgggttgttgcattaccaaatggtggaccttcccatgggagaattctggctgaatagtcctacccatgacaaactgaatgatatgctggatgctgtcagtggggcacatatttatggaaagagcattatccaggcagaaggatttacggaggtgcgtggtacatgggatgaacatcccggaatgttgaaggcgttgctcgaccggaattatgcattggggattaaccgccttttttatcatgtgtatgtccacaatccatggctggatcgcaaacccggtatgacattggatggcatcggccttttctttcagagagatcagacctggtggaataaaggggcaaaggcactttctgattatgccacacgttgtcaagcattgctacagtatggacatccggtagtagatattgccgttttcacaggagaagagattccaaggcgtgcagtactgccggaccgattggttccttctcttccgggtattttcggggcggagcgtgtggaaagtgagcgtattcgtcggacgaatgaaggacaacctttgcgtgtgcgtcctgtgggcgttacgcattctgccaatatggttgatccggagaaatgggtgaatccgcttcgtggttatgcctatgatagtttcaacaaggatgcattgctccggttggcgaaagtggaagatggcaggatgacattgccgggtggagtcagttataaagtgttggtcgtaccgcttcctcgaccgatgaatccggaacaggcagagttgtctcctgaagtggagaagaagattaatgaattgaagaaagcgggcatattgattcctgaccttccttataccggagatgacttctcggcatacggattggaacgtgatctgattgtgccggaagatgttgcttggacgcatcgtcggggagaacagggggatatttattttattgctaaccaacgggaagagacacgtactttcactgcaagtatgcgtatctacggcagaaagcccgaatgttggaatccattgacaggagaaatagacttccggccttcgtatgaacagaagaataatcgaacggaagttacactgacgttggcgccgaatgaatccgtattcatcgtatatccgacagaaaagaactgtttcggtgatgagaagagtttacagaagcaacagaaggaggggagttattctgcgaaagagttttcggaggttgcagtagaattgggagagtatacagtgaatttcataactaatggcaggaccgtaaatcggaaagaacttttcgattggagccgggagcaggatgagaagatccggtactattcgggaacagccgtctacaggactgcattccattggaaagacaaaccggaaacaactgtttatctgaatttgggaaaggtctgcaacctggcaactgtccgcgtgaatggtgtggactgtggaacaatctggactgctccttaccggactaatattacggcagctttaaaggagggtacaaatgaactcgaaatagaggtgaccaatacttgggcgaatgctctcaaaggagctgatgaaggaaaagcaccattcagcggaatctggacgaatgccaaatataggagacaggaaaaaacactgcttccggcgggactgctgggaccggtttcattcctttctttcgggttatgaattcattcaccacagagtaacacagagtttcacagagtttaatcaatttgaaatcaaaagaatagaactccgtgaaactctgtgttactctgtggtgaaaactcattacctttcccgatatgagttatataggagtgctgcaaagaacataactgtctgtgtggcaatgtacttggtgttccactaatatcagtcgtagtggaacacgagttcagccctagtgggaagtaccttcagtcctagtgggaagtaccttcagtcctaatgggaactatcttcagtcgtagtgggaaaagagcttatcactgatggattctaagctaaagtaaataacggactataaacaacaagtatctttctgtatgttagcgttaagctaatatctgatagttttttgatacacagttcggatacttgccactggtagctcgttgtttgggcgggctttgcccgctaaattttcattttattgagtacaaacttccctcttttccgtcttctctttacggaatccggttcttctctttttgggatgcttatcctgaactctgtgagaaccctaaatatacaacgatgaaaaacttaatagctacagcaggcactacacttgctatttttctatttgcagtttgcctgtcaactcatgcagaagtgcacctgcctgccatcttctcggatggcatggttatgcagcaacagacccatgccaatctctgggggacggcaactcccaataagaaagtaaccgtccgcactagctgggatggaaaactgtatgcggcaacagcggataaacaaggtgcatggaaactaaccgtttccactcccgaagcaggcggaccttatactgttacttttgatgatggaactccgaaagttctgagcaatattctgataggggaattatggctttgctccggtcaaagcaatatggagatgcctatgaaaggctttaaaaaccagcctgtagagaacgctaatatggatattctccgtagtaggaaccctgagctaagactattcacagtgaaacgtacctctacgctcactccgcaaaatgatgtgacaggctcctggaaagaggcaagtccggctacagtgcgcgatttcagtgcgacagcctattacttcgggcggttggtaaatgaaatattggatgttccggtgggcttgatagtggcagcttggggcggttcggcttgcgaagcttggatgactgccgactggttgaaagcttttccggatgcaaagataccccggtcggagacagatatcaaatcaaagaaccgtactccaaccgtactgcataatggtatgttgcacccattgatcggactgaccatgaaaggagtcatctggtatcagggtgaggataactggaatcgtgcccatacctatgcggatatgtttacgacactcattaacggatggcgtaccgaatggaaacaaggtgattttcctttttattactgccagatagctccatacgattatggaattatcacggaacgtggaaaagaagtaatcaatacagcctatctccgcgaagcacaggcgcaagtagagcaccgtgtacccaataccggtatggccgtactgctggatgcagggatggaaaaaggcattcatcctccccgtaagcaagttgccggtgagcgattggcacttcttgccctgacaaagacttacgggatagaaggagtaaacggtgaaagtccttattataaaggcattgaaataaagaatgacacggtcattgtgagtttcgaacgtgccggcatgtggattagtggcaagaactgttttgaatcgaagaattttgaggtagcgggtgaagacaaagtattctatccggctaaagcatggatcgaacgcagcaagatgcttgtaaaaagtgagatggtaccacatcctgttgctgtgcgatatggttttgtgaattatgtggaaggagatgtctattgtgacggtttgccgttaggttctttccgttcggatgactggtgatacgtgtgaaatatgaaaagaatttatctgattataatcctgattcttgttggcgtgtcggctctttggagccagcatgccaatgttgtttggaatacctccagtcgtaattcttccgaatcaatgccgtgtggaggtggagatatcggtatgaatgtgtgggtagaagagggggatgtcttgttttatctgagtcgtagcggtacttttgatgagaataattgtctgctgaaacaggggcgttttcgtatccgcctgtctcccaatccttttaaagaaacaaaagagttccggcaggaattaatgcttaatgacggattcgtggagatttcggcagaaggtacacgaattcaaatttgggcggatgtattccatcccgtagttcatgtagagattgtcaatgcccgtcccttgcaggcagaaatcttttatgagaattggagataccgggaccggccgatccggaaaggagaggggcaacaatgctcctacaaatgggctcctccccagggagcagtaacaagtgccgacaccatccgtcccctcccaaactctcaattctccactcttaattctccacttattacgttttatcaccgtaatccggaagagaccgtttttgatgtagcagtatcccagcaaggtatggatacggtcaaatcccggttgatgaatcctttaaagaacctgacgttcggaggatgcctgtcaggtgagaatctggaatatgccggaatctcagatgcggtatataccggaactgattatcgggcctggaagtttcgttcatcgaaagtatcccgaaaacaacactttttcgttgtactgcatacagatcagacggagacagaagaacagtggatacaagacttacaagtcggtctgaggagaataatgccacatggaaaggtttctatgaaagtgctttcgcaagataagaaacaaacccgccaatggtggaacgctttctggcaacgtagtttcattgtggcagaaggagaggctggggagataacccggaattatactcttttccgctatatgctaggctgtaatgcttatggcaatgttcctaccaagttcaatggtggcttgttcacctttgatcctttacatatagatccgaaacaggcatttactcctgattatcggaaatggggaggcggcacaatgactgcacagaatcaacgtctggtatattggccgatgttgaaaagcggtgattctgacatgatgcctgcccagtttgatttctataaccggatgttgaagaatgccgaattgcgcagccgtgtgtattggcaacacgggggagcctgtttctgcgaacagatagagaatttcggtttacccaatcctgccgaatatggttttaaacgcccggaaaggttcgataaaggactggaatacaacgcatggttggaatacgaatgggataccgcactcgaattctgccaaatgatacttgagacgaataattataccgatgcggatatcacttcctatttgcctttgattgaaagttcattgactttctttgatgagcattatcgtatgcttgcttcccgtcgtggacggaaggagttggatggagaaggacacctgattctctttccgggttctgcctgtgaaacctataaaatgactaataatgccagcagcactattgccgcattgcggaccgtgctggaaacttacggacggaagaacgaaatgctggaagtaatcccgccgataccattgcgttatatcgaagtaaaggattctgcgaattccataactatgccggtgctgaaacaaacgattgcccctgctaagagttgggagcgtattaataatgtggagactccgcaactctatcccgtatttccgtggcgtgtttacggcattggcaaagaaaagttggaggttgcccgcaacacctatttctatgatcccgaagcggttaattttcgttcgcatatcggatggaaacaagataatatctgggctgcatgtttaggattggctgaagaatcccgacagcttaatctggctaaattatccaacggcccgcatcgctttccggctttctggggccccggctatgactggacgcctgatcacaactggggaggaagcggcatgatagggcttcaggagatgctgttgcagacaaacggagaactgatactcctgtttccggcttggcctctagaatggaatgtgcacttcaaacttcatgcacctggtaaaacaacagtagaggctactttgaaagagggtaaagtgacagatttaaaagtgtcaccggaaagtaggaagaaagatgtggtgataatgattcaagagacaaaatgataatatgaaactaagaaatatgaataagaacttgtttttaactttgtcagcctttttgtttttattcccattatcagggaaagcgacaggaacttaccgtcccgagacctcagttgccggtttcattcagcttcccggaagcggacggcaggtatatgatttcaatccgggctggcgcttcttcaaaggcgacatatctggagcggaaacagtgaacttcgatgatcgttcatgggaagttgtctccacccctcacactgtggaactaatgcctgctgaggccagtggatgccggaactatcagggacctgtctggtatcgcaagcatttcgtcgttcccgcagagactaaaggtcaacgggtatccatccattttgaagctgcgatggggaaacaaattctttatctgaacggaaaacgtattcaggagcatataggcggttatctgcctttcacactggacttgacaacctatggagtgcaagccggagactcctgcctgcttgctgtttttgcagataacagcgatgataaatcctatcctccgggtaagcgtcagtataccttggatttcacctatcatggaggcatctatcgggatgtatggatgattgccaaatcccctatatccattactgatgccatcgaatcgcagacagttgccggaggtggtgtgtttgttcacttcgatcagatcagtgaaaagagtgcgcaagtctgtgtcaatacggaagtacagaatgaaaatacccgttctgaatctgtgattgtagagacgacactgacagatgctgacggcaaaataatcaggcgcatatccggtaaactctccttgcaatcgggagagaagaaaataatccgtcagcaaatggaagtgaagaatccgaagctatggtcgccggatacaccttatttatatagagtacagtctcgccttaaaaaaggcaatcagtccatagatggcggaatcacccgtgtcggaattcgtctggcggaattccgtggtaaagatggcttttggctgaatggcaaacctttcggtcagttggtgggagccaaccgtcatcaggatttcgcttatgtgggcaatgccttaccaaactcccagcaatggcgtgatgccaagcgtttacgtgatgcaggatgcactattatccgtacagcccattatccgcaggacccgtctttcatggatgcatgtgacgaacttggcctatttgtaattgtcgctacgccggggtggcaatattggaacaaagatctgcaatttggagagcttgttcatcggaatacacgtgaaatgatccgtcgtgaccgcaatcatccttctgttttgatgtgggaacctatcttgaatgaaacccgttacccgcttgattttgctttgaaggctcttgatattaccaaagaagaatatccgtatccggggcgtccggtagctgctgctgatgtacattcggcaggagtaaaagaacattatgatgtggtttatggttggcccggtgatgatgaaaaggaagacaggccggagcaatgtatcttcactcgtgagttcggggagaatgtggatgactggtatgcccacaataatgataaccgtgcaagccgcagctggggagaacatccgttgctggtgcaggcactttctctggctaagagttatgatgagatgtatcgcactacgggcctgtttatcggtggtgcccagtggcatccgttcgatcaccaacgagggtatcaccctgacccatattggggaggtatttatgatgcttttcgtcagaaaaaatatgcatacgagatgttccgcagtcagtcttcagctagtctgcggcatcctttggctgagtgtggacctatggttttcgttgctcatgaaatgtcgcaattctctgataaagatgtagtggttttcagtaattgtgattctgtcagactttctgtctatgatggaacaaagacatggacgaagccggtggttcatgccaaagggcatctgccgaatgcccctgtcgtttttgaaaatgtatgggatttctgggaagctcgcagttatagttatactcagaagaattggcaaaaagtgaatatgattgtagaaggcattataaatgggaaagtagtatgcactcagaagaagatgccttcacggcgttccactaaattgaggctatatgcggatacagggaatgtgaatctggtggcggatggttctgatttcattgtagtggtggctgaggtgactgatgacaatggaaatgtgagacgcctggctaaagagaatatcgtctttaccgtagaaggggaaggagatattattggcgatgctactattggtgcgaatccccgtgcagtggagttcggttctgcccctgtactgattcgttctaccagaaaagccggaaagatcaaagtgaaagcccgtgtactatttgagggtacacaagctccgacggctgcggaactggagttcgaaagtgttcctgcagaatttcctttttgttatgaggagcgggaaatagcttctgcggctgtgagaacaaggttacaaaaagatacaactgacaagaaaatacagttgacggaagaagaacgccaaaaggtgttggatgaggtagagcgtcagcagacggagttcggaacaaaagaataatctaaaataagggagtgataattttagtcactgttagaaaaagcttatctttggatacattttatatcaactgttgttataaatgaagaaacgatctattctaatactatttctatcggtgatagggcttacaagctttgcctatcccagcatgattgtggaacactacacggccgaacgagggttacctaataatattgtaaactgtactttaaaaggtagcgaaggctttgtctggttcggtacttggtatggcttatgtagttttgacggcactaagtttcgttcgtacgataatcgtgacggattctattcggctgatattcctccacgtaagattcagcgtatcgtagaagataaaaatggttttctttggatcaagaccattgatcgcaaactttatctgtttgataagaagcatgaaagttttcatgcggtttatgacgatgtgaaggaatactctgaaaatattcagattatcaagattcagacaactgcggatggggatgtcctattgctgaccaaggataagagtctgcttcgtgcgcatactgataaagagggcaaaattacaatgaagcaattgcacgattcacgccctaatatcaatcactacgatatgcgtttgaagcataatgtgttatgcgagacttccgaatttatcaattgggtgggtatggattatcagatactttcgttaaggaaaggagcggggttgaaagataagcctgccgatttcattcagaagaagatagccggtagccccgaccagttcacctgtgcatcttataactccagatgcttatggttaggtgaccggaacggacatatttatagtattgatccggaaaatggagtggtcaatcgttatgaaataccgggaatagatcagtcggtcgtaaatttgctggtaacagagacagggttggtctatattactacaggtgaaggagtatatgaatataatatcggttataagcaattgacaaagttgccgctttccatcgacgggagagaaacaggaactatatttatagacaaatatgataaaatttggtttcaggaaggtaataatgcattggtatactatgatcctttaaataaagccaatcgccgctttacatttcctaaacagaattccataggaaattttgaaatgcaagatgccggtgaacagggtatgttttttctgactccgggtggagagattcttttgttcgaccgggagaaactggagatggttcgtctgaatcaatcaaagcctttcgttgatgatgctcccggacaactgttttttcatctattgctggacaaagacgagattctctggttggcttctacagataatggggtgtacagggttaactttcccaagaagcagttccaagtacttaaagaagtgtcaccggtgccggttggtgatgaaaaacctaattcctggaatcaggggatacgcgctctgtatcaggcaaagaatggcgatatctgggcaggaacccgttggcaggccctttatcgccttgatagtaacggacaggtaaagcaggttttctcggaaaagaattatctggtgggagctgtatatcatatcatggaagataaagatgggaatctttggttctctaccaaaggcaatggtcttgtgaaggctgaaccggatatgaattctcctcaagggttacgcttcgtacgttataaaaatgatcctaagaatccgaattcaatcagtagtaatgatgtgtatttcacttatcaggatagccaggggcgtatttgggttggtttgttaggtggtggtctgaatctgatcagtgaagcgaacgggacaattgccttcaagcataagtataatggtttgaagcagtatccgctttatgggctttatatggaagtgcgtacaatgacggaggataatgacggacgtatctgggtaggaacaatggatggtctgatgtcttttgatggtcattttaccaatcccgaagagattcaatttgaaacttaccgccaggtgagtgaacgttcgaatgttgctgacaatgatatttatgtattgtacaaagattccgaatcacaaatctgggtaagcgtatttgggggaggattgaataaactggtacactatgataaagaaaggcgggtacctgtctttaaatcttacggcatccgtgaaggtatgaataatgatgtcgtaaaatcaatagtagaagataaagacggaaatctctggtttactacagaaataggattgtcttgtttcaataaagacaccgaacagttccgtaattacgacaggtacgatggattcctgaatgttgagttggaagaaagcagcgcgctccgtactttgagtggtgacttatggcttggttccaggcaaggtattctcacattttcacctaataaactggaaacgcagaatatgaactatgatacgcgcatagtcgacttcaaaatctccaatcgtgatttgcgtagttttcatgaagatcctgtattgaaagaatcgattacatttgccgatgcaatcaggttaaagtataatcaatctatgtttaccattgaatttgctgcgttgaacttctataatcccaatcgtgtgttttatcgatatattcttgaaggatacgaaaaggagtggcattacaatggtaaaaaccgtattgcttcttacacgaatgtgccgcctggatcctatactttccgggtggaaacaatagatgaagccaatccggaactcgtttccaatcgtacattggccatcactattcttccgccctggtggttaagttggtgggctattgtgatttatgtagtcttgggtattatagccctttatttcagtttgcgtctggctctctttatgattaaaatgaagaatgacatctacatcgaacagaaggtttcggaaatgaagatcaagttctttacaaatatttctcatgaactacgtactcctctgactttaataaaaggtccgatacaggaattgagagagcatgagacactttcaccaaaaggtgtgcaatatgtggaactaatggagaagaacactaaccagatgttacaacttgtcaatcagatacttgatttccgaaagatacagaatggaaagatgcgtttgcatgtgtcgttgattgattttaatgagttggtagtctctttccaaaaggaattccgtgttctttccgaagaaaatgaagttagctttactttccagttaccggatgcggctattatgatatgggcggataaggagaagctgagtattgttattcggaacatcatatccaatgccttcaagtttaccccttccggtggcagtatccatgtagttgccggactgacagaagatggggaacactgtttcctgagagtggaagataacgggatcggaatcccccagaataagctgaccgaggtttttgaacgcttctcgcaaggagagaatgccaaaaactcgtattatcagggcacgggtatcgggctggcactttccaaagaaatcgtgaatctgcatcatggagtgattcgtgctgaaagccctgaaggaaagggaaccgtgtttattgtagaactattgctcggaaaggaacattatcgcatttcggaagtcgatttttatgtcagtgacactgaaacagctcctgccggagatgtgtcttctactgatatcatggcagaagaagattccgaagaacagacggaaatagatgcttctttgccgaatcttttattggtggaagacaataaagacctctgtcaactgataaaactgcaattagaagacaagtttaatattcatatagccaataatggagtagagggattaaagaaagtccacctgtatcatcccgatatcgtggtcaccgatcagatgatgcctgaaatggatggtttggagatgttgcagtctattcgtaaagatttccagatcagtcatattccggttatcatcctgaccgcaaagaatgatgaaggcgccaagacgaaagcaatcactttgggagccaatgcttacataacgaagccttttagcaaggaatatctgttggcacgcattgatcagttgctatctgagcggctgctcttccgggaacggattcgcctgcaaatggagaatcagaaaacaacggaggaagatagttatgagcaatatcttgtgaagaaggatgtgcagttccttgaaaagatacatcaggtgattgaggagaacatggacgacagcgattttaatatcgatactatagcttctggaataggattaagccgctcggcattctttaagaaattgaagagccttaccggactggcacctgtcgacctggttaaagagattcgtttgaataagtctgtcgaattgattaagaacacagacttgagtatctcggagattgcctttgccgtcggatttaaagactcgggctattatagcaagtgcttccggaagaaatataaccagactccccgcgaatatatgagtgaatggcggaaaggagagaaataaccgattacaaaatgttttcttaaccgtcttcttagaaaacctattaagattcgaaagaatgaacaacattaagaaagtattatcagtatggatgctggctacgtgcgtattaccggtggcagcacagtatcctgtcattcccgactcggtgaaagcgagagcggcaaaacaagaagcggagttcgaccggaaatcagatgcggcatggaagaaagcccttccggttgttatggaagaagcacaaaaaggacgtccttataagccgtgggcttccaaaccggaagatttggtgaaaagtaatattccggcttttcccggtgcggaaggcggaggcatgtatactcccggtgggcgtggtggcaaagtgattgtggtcacttctttggaagactcagggcccggaactttgcgtgaggcttgtgaaacaggaggtgctcgtgtcattgtgtttaatgtttccggagttatccgtttgaaggcgcctatcagcctgcgtgctccttatgtcacaattgccggacagaccgctccgggagatggtatctgtgttaccgggcattcttttctggttgatacgcatgatgtcataatcaggcatatgcgcttccgccgtggtgcgcaggatgtagctttccgtgatgacgcgttgggaggaaatgccgtagggaatatcattatagaccactgttcggccagttggggattggatgagaatatgtctatctaccgccatgtgtataatcggggagcggatggacatggactgaaattgccgactgtaaatatcacgattcagaattcaatattttcggaagcattggatgcctacaatcatgctttcggggctacaatcggtgggcataacagtatgttttgccggaatctttttgcttcaaatatcagtcgtaacagttcggtaggtatggatggagactttaactttgtcaataatgttgttttcaactggtggaatcgctccattgacggtggtgataataagagtttctataacattataaataactatttcaagcccggacctatcacaccattggataaaccaatatcttatcgtattctgaagccggaagccggacgtgacaaaagccagccgatgtcctttggtaaggcttatgtaaatggaaatatcgtccatggaaatgcaaaggttacaaaagacaactgggatggtggtgtacaactagccaatgaagtggatgccggaaaatttattccgcagataagggtagatgagcctttcaaaacatctcctgtaactataatggatactcaaaaggcttataacttcgtgttaagtaatgtgggagcgacttttccgaaacgggatgctgttgatacgagagttatcaaaacagtgaagactgggaaagccatctatgtgaaagacgctccagagttcatttctccttatgtgaaaagacgtttgcctgcagactcttataaacaaggtatcattacggacatccgtcaggtaggcggattgcccgagtacaaaggagagcctattgtggactccgatggtgacggtatgcccgatgcgtgggaaatagctaacggattgaacccgaatgatccgagtgatgccgtgaaggattgcaatggagatggttacactaatattgagaaatacatcaacggtatggatacgaagaagaaagtggactggacggatttgaagaacaactacgatacattatccaaacggaaaagtctgctataaaagtatgtgtggaaaataaagtttattgtaatgaatatgcaattgagaacaatccttctgggattattgagtatagggtttgtgcagggatatgcgcaaacctttgctttacaggttaagaatgaaggaattacttacctgaatgatgaacggggaaaccggatacttgatttctcctattgcggctaccatgcttctggtcaggatattccttctgttggtaatgcagtgtttgtaccctggaaggcgggtgataatactgcgcgaatccagcgtgccattgactatgtagcgtcattgactcccaatacttccggtttccgtggagccgtattgctggatcgtggagaatttagcttatccggggaacttcgtatttccgtgtccggcattgttctgcgtggtatggatagagaaaaaactattctgctaaagaaaggtgtagacagaggagcacttatctatatggaaggaatagataatttgaatgcaaaagataccttgcaggttctttcagcttatgtccctgtgaatgaaaggacattacaagttgcctcgggcacttctttaaagaaaggagatcggataatggtgactcgtccttccggtaaggagtggattaccgctttagggtgtgatatctttggaggaggcatcggtgctttaggatggaaggcgggtgatatggacctgacatgggatcggacaatcagtgaagtaaacggtaatcagatcactctggatgcaccattgacggtagcattggatactcaatatggggcttcttctctcattctttatcaatggaacggtcgcattcaggagtgtggaattgaaaatatgacattggtttccgattatgacaggcgttattctaaagatgaagaccattgctggacaggtatttctatcggagaggcggagaactgttgggtgagacaagtgagtttcagacatttttcaggtagtgcggttattgtccagcgcaccggatcaagaattacggttgaggactgtatttcccgggaaccggtatctgaaataggaggaatgcgccgttgtactttccatacattgggacagcagactttgtttcagcgttgttattctgagcagggcattcatgactttgctgccggatattgtgctgccgggcccaatgcctttgtgcaatgcgattcgtatgaatcgttgggattcagcggatctattgattcctgggcgtgcggattgctgtttgatgtggttaatatcgacggtcataatcttacatttaagaatctgggacaagataagaatggagcaggttggaatacggcgaatagtttgttctggcaatgtacagccgctgagatagagtgttatactccggcaaaagatgcgaaaaaccgcgcgtatgggtgttgggcacagttctccggcgacggtgaatgggcggaatcgaataatcatgtgcaacctcgtagcatcttttatgcccagttggaagagcgtttgcagaagaaatgtgctgagcgtgcccgtattctgcctagaaatacaagtgcaacgagcagtcctactgtagaggtggcgatggaacttgccaaagaagcttatgagccacgtctgacgttggaacattggattgaggagagggaatttgctccttcggtgtcagttgccggtttgaaatctattgaggatattaaagagaaaaagacaattcagggcgaaacgcgagacttaccggaaatggttattgcaaatgggcgtgttcaaatggatggggccttgttggtgggaaaaagccgcactactccttggtggaatggtaagctcagaaccaactatttgaagaaagcaagtccggcaattacccgctttgttcccggtcgtgagggactgggactgacagaccgtatagattcagtcgtcaactttatgaagcggaataatatactcgtatttgaccagaattacggactttggtatgatcgtcgccgggatgaccatgaacgcatacgtcggcgcgatggagatgtatggggccccttttatgaacaacctttcggacgtagcggtcaaggtattgcttgggaaggattgagtaaatatgatctgaaccgtcccaatgcatggtattgggcacgtctgaaagaatttgtggagaagggaagtagagaaggattgctcttgttccatgagaactatttccagcataatattttggaagccggtgcacattgggtggactgtccttggagaagcagtaataatattaatgaaacggacttcccggaacctgctccttttgcaggcgataaacgcatttttgttgcggatatgttttatgatatcaatcatcctgtgcgacgtgagctgcatagacgatacattcgtcagtgcttggacaactttgccgataatccgaatgtgattcaattgaccagtgcagagtttaccggtcctctgcattttgtacagttctggttggatgtaatagctgaatgggaggtggaaaccggtaagaaggctaaagtcgctttaagtacaacgaaagatgtgcaggatgctattcttgctgatccaaaacgggcagctgtagtagatattattgatatccgatattggcattataaaacagatggtatttttgctccggaagggggaaagaatatggctccccgacaacatatgcgcaagatgaaagtcgggaaagttacttttactgaagcgtataaagcggtaaatgaatatcgacgtaagtttccggagaaagcagtcactttctatgcacagaattatccggctatgggatgggctgttttcatggctggtggttcttgtccggtaattccttgcaaagataaagcgtttctgaaagatgctgcagtgatggaagtagaagaaactgactctgaggattataagaaaatggtaaaatctggtatcggaagtatcatttattccaattcgggggtagaggtgcctgtgcaattgtcatccgggaaatacattttaagatatattcatcctgattcgggagaaatggaagtgattagtaaatcattgaagattaataatgtatatactctgaaagtgcctgatggaaaagaaggtatttattggttccatagattatagaacagaaaatcccgttgaatgaccttcaacgggattttctctttttgctggtaatatctaataaaaaagtgttataaaacatagtacttgttttttcaatccacagatcagattttacctagagtttgggttgattccccatagctttgcaacatcaaaataactgaattaatgctatgatggaacagactaataattcaaccgaaactttacttgcttcttttcaagcaggaaatatggctgctttttctcagctgtatgatttgcacgtacgtattctttttaattatggtttgaagttgacccttgataaggagttgctgaaagattgtattcatgatattttcgtgaaactttatgtgaagaaggatgaattagggactattgataatttgaaatcctatttattcatttcattgaagaataaactttgtgatgagcttcgcaggcgtatgtatatgtccgacacggccgtagaagaggtgaatgcgatatcatctatggatgtggaagaagattatgtggaggaggaacaacagaagaatgatttctcattggtgaaacatttattggggcagttatctccccgtcagcgcgaagcgcttacattatattatatagaagaaaggaaatatgaagatatttgtgatattatggatatgaattatcagtctgtacgtaacttgatgcaccggggattgacgaagttgcgtgctctggtgagttaatttaggtaaaagggttttccgattgagtacaggttcagggtaacagcgtcctatctttgtaaacgtttaaaataggatgcaaatatggtttctaaggtaagggattttttgatggatgaaggtttcattgaatatgtactgggtgtatcttcgaagctggtttctcaatgggaagcttatttcaagatacatccggaatatatggctgctgtagaggaggctaaagctgttttactggctccggctgacgtggattgtgaattttcggaagatgaatatgatgatttaaaggataggattattagtagtatatttgatgtacattgaaacaagttaaatatgtttttatgaattttaatctcaatcgtatatatagaatggtgagttcatcctctttggggagtatttgacattgtaactttatgcagtaatcctgttttagtgtgtggtaacagtacagctgattacatgatactacaaagcaaatgcagtgttgttgtatgatagatgcgacattactgcgtatatgtagtaataccgcaagggtaaaaagaaaactttattagtttatggtaatgcttcagttcattcgttggatgtttttatatgtagggggcgtaaagtaaactgtgtcatgcgctgtttttctttcaagctcatcggtcggggatcggccagcgccaagggggtgcaccagcactcccgacgagcgtaaaattacaacaacttaaatctatctccaaactttatcgccagttgttgggcaattgtgccccaattagccagtggcatagtccatttcttgcgtatgttgcgataagcgaggtagacaagcttctcaagggcggtgtcattagggaacacgcccttgttttttgtaactttccgtatttgccggtggtagccttcaacggtattcgtcgtataaatcatacgacgtatatcggatgtgaactggaagtattcagtgagcttttcccagttgtcctgccacgacttgatgacgataggatatttctctccccatttctgatctaaatcaagaagctccgtttcagcggcatccttgctgactgcaccgtaaacccgtttcagatctttaagaaactccttctggtgtttactgccgacatatttgatggagttacgtatctgatggacgatacaaagttgcactatggtatcagggaatacgctttggatggcatccgggaagcccttcagaccatcgacacaagctatgagaatgtcgtgtacaccacggttctgtaaatcggtcagcacattcaaccagaagtttgccccctcattcttagagatgtacatcccaagcaaatccttacgaccgtccttatctatagccaatacgttgtagattgcacgggtaatggcacagcctctctcatccatgactttataatgaatggcatccatccaaactatcggataaatatagtccaggctacgcgaacgccacgcttttatttccggaagtacccggtcagtgatggaactgattgtttcggcagacacacggttaccaagattctcttccatccagtcgcttatttcacgtgtactattaccaagggcataaaggccgattatgcggtcagcaacaccttccgcaagaatggtctcccgcttctttataaactgaggatcgaagctggaattacgatcacggggtgtagaaacggtcacctcacccatagaagtttgcacctgcttctgcatcttgccattacgacggttgccactcatgcgttcatcctcggaaagatgggcatccatctcaccttctaaggctgcatttaaaatgctctccaataacggggcaaaagctccgtccttacccaacaagggcttgccagccttgagctgctcgattgccttgttcttgatcctttcaaaatcaaattcttcactcataaaaaaactgtgttagcaaagttaatactttttttgtttgctttgctgacacagtttaaattacagcctctatatgtacgataatggcaccatttgctccgttagaaccatagatactggcatctttcatcacttccacgtagtctacatcgtttaagttaaggccgtcgaacgaggaaactatcacattatctatcacatagacaggggtggaactagcagtaaaacttctgttaccgcgaatattgatattcatagtcttgtcttgtgtaccttgtcccgtgattgatagtcctggaacccgtccttgtagtgcttcgataacattgtgataaccgcttttccgaagttcttcgcccgatatgatattacttatacctgtatgttcccgtcttctgatatatccgaagcccaaatctatcagttccgcatcttcttgggactggatgttttcttcatcagccaaacgaattttcatacttttttttccgtcaacaggtactaggtataattttttcttaattaggatctttaaggtatcattcggaaaaacatttgttagtccgaattgtcctttcttattggttaatgcgtagtctttcgaagtatgtacgtatatgtgggcacctttgatgggctttcctaaaccatctgtcagcaatccgttaaatgctacttttctttgggcgcttatgttcaatgaatatgaaaataaaaatgcaataataagtagtagtgtgttatttttcattttatttaattctttagataagggtacccttttcaagtacccttattgattttaattaataatgcaatgcaaattatcttactttactattcgactagaccactgccggccgttgaaccatatccattgtcaccatattcttctttattcaagatggtagacaggaattcataagaaatcgggcgattataatgataaggtttaaatgattgggcagcacgtttgttgtattgatctaaacgagattcgaatgcattgtgacgtttcagtaaagaccagcgagagaattcgccacacaattcgcgggcatattcatcaaaaatatcctcttcagtagcagttgtaagtttccatgaagattcattggcttgatcgcgtgcggcacgtttacgaagtacattcagatattcggcggctttcgttccatttcccaattgctgctctgcttctgctgccaacaaataaacttcagccattcgcataatgaacatgtctccagtctttatttgtaggttactaccgtagaataccccattatatgaccagttgaacttaatcagacttggacaggcggatgaggaggtcagtccatttcctatagccggaggattggcagcttcacttccattgtctacattaccatacggtaagtcgttagaaccaaataagtcatctaaaacaactacagcatagagacatttacttttatccttcagtggtttatgaacaaacacggtgttgaaacgattgtcatctggagcaacagggtatggtatggcataaacctttgtagaaccagcgaaacctggcttcttggcttcttccgcactcttccctatggataataatttgttaggatctcctgagtaatcacctttaggccataccttggctggatattggttgcctgcgccattagaagaagctatggcattgcaatcagcatacggataaagcgttgaatccggatgaactgtctcatctacttgaatatcgtattttgtacagatactcttattcaatttctttactcctgcagagtagggaacccaaccgcactgaaccatactccattcgcaatatgcatattggaacgagtattcccaacgtttgtcccattcgggattgaagcaataaagcagatatttggacggcatccagttttgactgtttaggcgtccgtagaagtaacctttatcgccaggcttatgattgctgttgaagaattcactataagagcctccgcaagaataggctgataatttattgcctttaccgatatattgccaggaagtactgcttgcatccggaccggcggcaatcattaatgcttccttattggttctattattggcgtcggcccacatatcggcaatatcggtgtagagataagcaccataggaagaagcgttttcaatgaggtctttggcagtttcggcagctaatttccaataggtatttgcatctccatatttactttgtccaagaccggcacgttgtgcataaacacgggctagtaaacctttggctgatttttttgtgaaacgtgctctatttccttgataaggttctactcctaaatctggaattgcttctgtcaagtccttgataatatggtcgtagatgtctctttctgaagaacgttctggatataagtccacatcacccgttataccagcactactcttgagatttaaagtgacgggtccatagtggcatactaagattgaataatataaggcacgcagtgtcttagactctgctaccagtagtttgattgtttcagggtcgccatcatttaagttagtagattcgttgattacagagttacaatttgtaatcatcgaataacactgtttccacactttttggaatgtattgtagttggatgttgggtcttcgtaattaaataactgcttatagttggttccgtttgatttagcaacccacaagtcggtaccaccttctgctaggtatagccagtccatggcagtatatagttcatcgtttaagcaagaatagctataactgtgcaatccactccatgcatcgaaagaggtaagagacgcatcaccagcactaggattaaactcatccaaatcgcacgcattaagcattagacccgcacaagccattaatgctatatttttgaatattcttttcatattttctgtctttaaaaattagaatgaaaggttcaagccaaacactagttgttttgttagcgggaagtccaatccaccacccatttctgggtcgtaatcctccagcaaatgactgttggcaataaccaatgggttggtaatagttccgtatacacgtagattggtcagtcctattttggaacagagacgtttaggcatggtatagcctaatgtaatgttcttgattttgaagaaagagccgtccacgtatgccaaagaagtataatattgatcatctctccagttgcggctggcatttaatgacgggaagtcgttggagggattttcaggagtccaatagttgaaacatgaagggaatgcaccaccggatgagctataccaggtaataggctcatagtaaaacatttgcccttggcgtagatacatatagatagataaatcgaagtttttccaggtgaatgtattttggaaacctagtgaccaatcgggagatttatgtccaataatctgcttgtcatcggcatttacagaataagggttctcggcatcataccggtttgttttccatgtaccatcttcttgttcgaaggatttttcccaaacgccattgcttatcttttccatattgggtatttctacttttaagtcaccgggttgttttccgaatacggcggcatcagcttcttcgccatattgccatacacctgcgatcttgaaagcgcgatatgactgaagagcatcgccaatatgtaaagtatagtccccattctcgatgaagtcggcagcaccttctcccaatgctgttactttttctttgtttttgaagaaggtaacggtacttgtccaattaaagtttctgctcacaatgttacgggtagtcagcgtcaattctaagcctttgttctgtgttttggctatgtttctgtttatttggaaaactgacgaagcattaaatgttccgttggtggccggtacattctgtttccaaatgacacctgtggtgttggttatgtagtaatctgcattcaagtcgatgcggttatttaagaaagaagcatcaatgccaatatttgtattttttgaacgttcccacgttaattgtgggttactgagcttttgcgggaaagagtattgggtaatctgttcatctcccaaccccatgatactttgtgagaggatggcccaagagtcataggcgctaatgccggccgcacctgtctctccgtagcctatgcgaagctttaagttatccaaccagtcggaagttgattccataaaactctcgtctgaaattctccaaccggcagaaaaagcgggaaaagtgctccaacggacatctttagctaatttggagtttccatcgtagcgcacagaagcggagaataagtatttacccaagaatgaataatttaagcgtcctacaaagcccatacttttccccatggaatatcctgaactgacagttttatttccaactgcggcagccaagtttgtccaataataagtattactgaggatgccgacagcatttgaagaagaactctcggattggctatctgaatatgttgttacacctgtcagcgtaaattcatggtcattggaaattttgaaattgtaagtcaggatattttcccatgaatatccccaaccgcggctgttgcttaccgaagctgatgtatattgggaggtttcttctttactggcatttaaagctccagttcctgcctggtcgtagaattgataggaaccataaccaatgaacttgttagttgtattgtagtttaggttcatactcaagcgagattccagactaagtccttttagtggagtgatacggatgtaaggctgtagatagattttgaatttatttgcattgttgcgatatacatcacgattttggttaagcaataagtttacttgtctattatcttcaagcacaggatattcatttaatgaaccatcctctttatatagagtaccgaatgggttagctctcattgcttgagataggtcactggatgttttctcttgcgttgtataagaagtttgcatatgcatacctgctgtgaaccatttggtaacttcctgattgatccgggctgttgaagaataaagtttatattcatcatttgtatactgaccctgctcgttagaatagttcagggagaaataagcctgcgtcttttttgttcctcccgaaatagaaagagaatagttttgggtggaaccagtctgcatcatagcatctacccaatcaatcgtatgaccggcattgactgcatcttgatagatttcatcataaacagttccatcatcttcaatagtccctgcccatttccttgcttccatacgtgtgtcaagccatcgttgggggctgttcattttaggtaaggtggaccatccgttaaatcccagataggtattgaagttgacacttagtttaccttcttccccctttttggtggtgataatgacaacgccattggaaccggaggaaccgtaaacagcagttgatgaagcatctttcaatacttcaatactttcaatatcgtttgggttcagtgtttcataatcgcctggcattccgtcgataataaacaatggtttgcctgaagctgtgatagaacggttaccgcgtaattgcagcgaaacgcccgtgccagcctgaccggaagactttgtaatatccaaaccggctactctaccttgtaatgcctccatagggttggctgatggagtcaactttacaatatcgctcttgacagatgagacagctccagtcaaatctctttttttcacagtaccgtaacccactactatcacttcgtccaaagttttggtgtcttctgtcaaagtcacattgagattgggttgagctttcacacgttgtgtgatgtaaccaatgtaggaaatttcaagtgttgtgcctgcgggcacctttattgtgaaattaccgtcaatatcggtgattgcaccattactttgactccctacttgtagtatggtggccccaatgattgtctcaccggaagcgtccactacttttcctttcactacaatttgttgttgctgtgttatgatagatgtcgtctggatgccagttgcaaaggcgacatcagggacaactaacagacttgtacacagaactgcaacggaacataatggcctgtataggtttgaccattctgagaaatgttttttgttttgatacatagtactaactttaaaaaaataacattttttaggttataattctattttgaatgacgtggtattaattaaattgtaatcagctaatgaagtttttttaataaatcttgcattagaaattattaaaatgttctctgttgtttttaagtaaaagaattgatgattacagaatatgaattcttacgtcttatggtagagtttaaggttgacttaactttcgcagaaaaatattcttagactttttctattcttttttcttcttgggaactaacggtattgtttttctgcgaaaactgaataagactatgaatgggaaagaaatttagatttaattaatggtatgaatagacaagttgttgttagtatttatttactcctttttatcttgtttccggcgaaagctcagaatagagagatagcatgtaatgcggattccgttcaagttctccatcgctataaaatagctgtctgtgactggatgattttaaagcgtcagaagattggttcatttaagttggtgcatgaattgaatggtgatggtgtggaactggacatgggatctcttggtaaaagagaaacatttgataataaattgcgtgatccccattttcagcaactatttcgggagacggctcgggaatttcaactggaagttccttccattgccatgtccggtttttatggtcagtcttttttggagcgtgccaattatgaggagttggttagggaatgtctgaatgctatgaaagtaatggatgctaaagttgctttcctgcctttgggaggaattaaggcgggatgggaaggagagccggcgcttcgggcggaagttgtaaagcggctgaagaaagttggagatatggctgctgccgaaggtttagttattggaattgaaacccaattggatgccaaaggagatgtcaaattgttgaaagaaatagattccttcggtattaaaatctattttaagtttcagaatgcattggagaacgggcgtgatttgtgtaaagagctcaagattctggggaaaaagagaatctgccagattcattgtacggatacggatggggtgactcttcgttttaatgagaggctggatatgaataaggttaaaaagacacttgacaagatggggtggagtggctggctggtagtggaacgctcacgggataaagatgatgtgcacaatgttagaaagaattatgggacgaatattgaatacctgaaggaggtgtttcagaaatgaatctgtgaaccttaaacatagcatatatgaagaacacaattattttttctctgttttgtttcttggtgtgttattctgtacatggacagacacagaaacaacaaagtgatagcttgcgtatgcgtatggcattctcatctatagaaattccgagttataagaaggaactggctctgccacagacatggttgatgaacatgtatggagattatccagtggatttgtccagcggacttgtagacatttcaattcctatttatgaaatagaaacaccaaatctgagattacctattacagccaaatttcatgcgtcaggattaagagctgatgagcagattgggacaatggggttgcgctggataatgaatgtggattgtatggtaagtagaaaggtgaaaggatatccggatgattgtttttatggaagtgcgactgctccttttgataatagagtgaatgatcctaattatctgccggatttggctacactatatggcggaacagcatataataaagaattgtatacttcttatgctatttctcctaatatattaccctatttacctaattactccggtccggcttcagtctttaaggatacagagtatgatttgttttcttatcatctaccttccggaaagtcgggtaagtttatactccacgatagtgccgggataaagaaagcatatacgataccttatgaacctgtcaaagtagaggttaaaagagttaatggacatggacttttcaatcaggttgtaatcacagacgaaaatggtataacttataattatggcaaaactgttataggagatgaagggaatactgattcgcaacaaataaatggtgatccgatagtagtaggttggcatttgaatgcaattatatccgcagacaagaaagattcaattctgattgagtatcagaatttatggggaataaaaactaaatattggcaatctatggattatattatcagggatgatcataaagctcaaattcctatagattggcctccgtatccatattatataagtgatttttttagtgaggagatcagaggatgtaaattaaactgtgtcagccaagaaaagaaataaaatattaactttgctaacacagttttttttatgaaagaagaatttgattttgagagtatcaagaacaaggcaatcgaacaacttaaagcaggtaagcctttgttaggtaaggatggtgcatttgctcctttattggaaagtatcctaaatgcagccttggaagatgagatggacgcacatcttaccgatgaagaacgccaattgggtaatcgtcgtaatggtaagatgcagaagcagttgcagactccattgggtgaggtcacagtttctacccctcgtgaccgtaattcaagttttgaacctcagtttataaagaaacgcgagacaattcttgcagaaggagttgccgaccgtataataggtctttatgcaatgggaaacagcacaagggaaatcagtgactggatggaagaaaaccttggtaatcgtgtttctgccgatacaatcagtgccataaccgaccgtgtacttccggaaataaaggcatggaaatcccgtatgttggattcagtttacccaatagtctggatggatgccattcactataaagtgacagatgaacgcggttgtgctgtatcccgtgcaatctacaatgtattaggaattaatagggatggtcacaaagaacttcttggtatgtatatatctaaaaatgaaggcgctaacttctggcttagtgtcctggcagatcttcagaatcgtggagtggaagatattctcatagcctgtatagatggtttgaaaggttttcctgaagccattcaaagtgtttatcctaacacagccgtacagctttgtatagtacatcagatacgtaattccatcaagtatgtaggctccaaaaatcagaaggaattccttaaggatttaaaatgcgtctatcaggccgtaaataaagaatctgcagagaatgaacttctcaaactggatgaaaaatggggtgaacagtatcctatcgttatcaggtcctggcaggagaactgggataagctgtgtgaatacttccaatatactctggcaatacgtaaacttatatataccacaaataccgttgaaggatatcaccgtcagatccgtaaggtaacaaaaaacaagggcgtattcccgtcggatacagcccttgagaaactggtttatcttgcataccgtaatatacggaagaagtggaccatgccactggctaactgggctacaatctcacaacaattagccataaagtttggagagcgatttaaattattgtaattttacgctcgtcgggacgggtggtcccgcccttggcgctggccgttccccgaccgatgagtcttatagagaaaaataatgcgtgacacagtttattttacactacctgaatgaccattttgataaagagcttgatttcttttcaataggggtaattgatgctcatacatatataagtgaacgtttaaaaaacgccgttgaagcaaatggtttaatggggtgggtttttactccgactactaaattggttgtagagtaactgtttacctgtatatatttggcattttgatatgttataacggaaaattgttagctttttgtaaaacaatagagcccctttatatttgccgcttacaaggagttaagagtttgtcagcaggaagttaactccttgttgacaaactcctaacttcttgtcgacaataaatggacttcttgcatttgcttgataatcaaatgttaactattttccaccccccaattgtacgcgtcgcactgtcgaagttcaccccgaccttgactatctgtctgccatccgattgataaggaatggcgtactgtttgctgtctatctgagttaaagcctcttcgggggtaccatcgaacttaaactcaaagacgtaaatggcatctttcatctttacgacaacatccgcacggccgatggcacttttcacttcagcgtccacatattgtcccattaaacggaacaaaaggtaaaaaatggtttgatagtgcttttcggttttgttctccaaatcattgggaatagaagcaaaaaaggaacgggtacgctccaggcaactttcaatatcgcctttgcgtaaatcgcggataaatgaaacgacatagaaggtgttattttgcccgggaaggtgtacgtaggcaggcagcagagattctataaatcctttgcgtacttctccgttggggtatgccaaccggtatatttggaaatccggatcataacctttgatggtgagataaccgctttgatagagcactgggatgggacttgttatccgttcggtcggtgcgtcaaactgttcatcggtagcttctacactttccagttcgcgcacgtcaaaatccacttcctgaagcaggtctatcaggaaagtgggtgtacctgtggaaaaccagaagttcttatattcttttgcatcaaaagcattgaacaagctaaaggggttataaatatcttcgcaatgcttgctgaagtggtaaccgtcatattgctgcttcagatgcaagcaagcttcatcgtaagtttcaccgtttgcttcagccattcgagcgatatccgatttcaattgcgtcagcaattcctgctcggtgataccgcacagtgcactgaagtcatcacgcatactgatgtttttcaagttgttcagttcactgaatatactcatctgactgaatttgctgattcccgtaataaaaaggaagcgcagatattgtcccaaacctttaagcggactgaaaaacttgcgcatttcgttgcggagctgttgttgaagcggaatatctgagttgctgtccagtagtggtgcgtcatattcgtcaatcagcacagctatggtttttccggtctgtttgtaggctctcaatatgatcccctgcaaacgttctgctgaagttgtttctacttcatcttttccataaatcttttcccagcgatgcaggaaaaggttcagttgtccagtgagatcagtcagttctgtgtatttcgtcaggctgaagtctatgtgtagtaccggataaactgtccattccttttccaactgttccattgccaggcctttgaaaagttctttttttccttgaaaataggcttcgagcgtagatataagtaaacttttgccaaaccgacggggacggctgaaaaaataaactttatcagtattagctaatctgtagactaattccgtcttatcaacatatacacattgccggttgcgcaattcttcaaagttttgtattcctatcggataacgtctgtaattctcttccatatctgctgatttttagcgtttacagttatggcaaagataaggcttattctttgaattcgcgcatttctatttgcaatatgtgataggagaggggaaaatagataaacttaattccgcagtcactatctggagccgatacttctggttgtagtttgcaaagctatcggcttttaactcctgaggcaacttgtttgacgctaactccctttaaatccttgttataagcgtgaataagaaagttgaatgatagaggagaaacttgatatgccccttactttttcccctaaagccttaaggttaatgttattatgctagtaagcattcggtcttgtgcattcctctttgttccctctcccctaagtaaaaagcctgagacttttcaaatcccaggctttttagtaatgcttaaaaaataagttggtatgaaatatgtcacaaataaaagtaacttgggttccccacgccctccggatctcttattatcgggggagataattcccgggaggagaaggattgagatagtattattcatcatttagttcatatcttttcacttcatacgggatgataactcttctaattcctaacaaaagatattcatggtgggaaaaagtattagaatccgtctctctttttgtaaagtcaatggaaaaaacttatattctctgcttacaggaagttaacttcttgtcgacaaactcttgacttcttgccgacagaaaatgtatttcttgtaatcttttaataatcaatggttaagcattggcctgaaagagttgttttgtaattatagttgccctgtattttacgtgccccttctgcttttcatccccttctgctttgcacccgctcttactttacgcttccctctgctttgcatcccctcttacttgctcttacatagcgctttctttaccttctaatgctttaattttgtgtgcctacatctgtggtttacgtgcttcacaactgtgggcgtgctacttcacatatgtgaagcacatgaatcacatatgtggacattctaaaacatcgcttgtcagcggaagaaacatggagtgtaagcagaaggaacatgggtggttagtgaaagaaatacaggccggatgacgcaagattatgacgtgtactgaacggacgaaggcgtacattaagcaaaaagcggcataccttccatacttttcttcataaaaaggcataaaaatagcagattgccaaacagtcattttgagcatcttgcatgatgtatccggcagattatgagtgatatatagagagagataggttggtgcaggcaaatttacctacacttttttttatttgctgccaccaccgctctagccccgatgaataaggagatgcaagatatgagtgcaagcgtgcaggtaaaagtgtgtgtaaactaatagtaaccctgagttcaagttataaatgcaggatatccgatgaataaagctttaaataggcatttctcttttttgttctttttaggtgattacatattttttagttgttcgtcctttgtatgtgaaaatacatattgagtccaatcaatggtttttatatttttgaattaaaattagtaaacagatgaaaaaagaagaaatcttttctggaaaaacacaaggcaaatatctgagcgcagcgaagattatttgtttctctttcttgttttcgattcctgtagcggcatttgctgaaagcgtggtggaagtgcctgcggtaagcgtggttcaacagcagggaatagtgaagggaacggtggttgacgaacaaggcgaaacggttattggtgctaatatcaaagtagtaggcactactgtcggtgctattacggatctaaacggtatgtttagtgtgaatgcgccggtaggggcaaaacttgagatatcatttataggatatgtaactcaagtggtgactgttccggtaagtaggagccttaaagtaatattaaaggaggattcggaactactggatgaagttgttgtcgttggatacggaacacagcgcgtgaaagacttgactggtgcggcaactaatgtgaagatggaagatattcccgatttacctggtacatccatacttgacgcattatccggtcaagtagtgggactttcggttacgcagagtgatggccgcccgggatctaccggttcgtttaaggtgcgccagcctatgagttttgatgatgcaggtaatttcaatcaaccgttgattgttattgatgatattgttcaggtggatgaaaacggtgaaccttcaatgactgcttttaatatgctgaatcaatcggaaattgaaagtatgactgtattgaaagatgcttctgcagctgtttatggttcgcgggcttctgctggcgtaattttggtgaaaaccaaaagaggaagcgtaggagcccctaaaatatcttattctggtaagttggatttcgcagatgcagtaagtcatccgaagacaatgaatgcttatgaattgggcatatttacgaatcgtctgtttgaccaaactgatatggtaaagggtaatcaagataacttaatatataaatattcggatgcggaattgaaagctttaaaaggattgaattataattggttggatgaggcatggcattcttctctttcgcatcgtcactctctgactgttaatggcggttctgaaaaggttactttttttgccggtattaattatcaggaacaagatactaaccttggcgatgtgcaggattatagcaaatggacttttcgtgcaggtggtaatgtcaaagttgcatccgggttgaatttatctgcttcaatagctggttataatagtagtaaggtaggcaataatatacagactaatgttggtgcaggaccttggggaaatcagattgcatccagagattatgcaatgttgaatcacatgcctaattatattccttgggaaacttcaatttacgatgaggctagtggagagacgaaaaactattttgtatctccatggggcggtccgaaactcctgaatactcaagttgacagtaaagttagtggatatcctgtatggaattattttgcagaagaagcttctaaatcaagaagttataatgatgctaatggttataatgcaaatttctcattaacgtatgatgtaccgtttataaaaggtttaagtcttaagggtacttatgctgtttctttcaataattcgcattctgaaattgttggcgattacttgcatttggctcgtgccggtaatactaatgaagtagggatgcacttgctgggcgattatacaacatggaactttattaatttaggagacccggacggaactcttcttaaaaataagccaactgtgaaatatggtaagaatacaagtaaaagcgaacaattgaattttgccatttcttatagtcgtgtttttggaaaacatgatgtttcagctacagcagtagtagaacgtgctgagagtgaaggagatgaattgttgcaaatgtatggaggtattggtatgtcatacggaggaacaagtgctacggctggaacgctaataacagatgctgagggtacgcattataaaaaatatgaaagtggctctctctcttatattggtagagcaagctataaatatgataaccgttatttggcacagtttgtattccgttcagacgcatctacaaaatttgctcctgaaaactattggggattctttcctacaggatctctcggttgggtagcatctgaagaaaaattctttaaaaatagtgcattgggaaaaatatttgatttcatgaaggtgcgctatagcttaggaaagactggtaaggataatgtggatgcatggcaatggatgcaaatttataatattaatcctactggtggtatgggatttggttccatagggggacaattcaccggtggtgccgttattaatggtacagtcaatcgagacatcaaatgggatacaactatcaaacaaaatgttggtttggatatgaacgtattgaataatcgtttgtctgtaactgccgatttttattatgacaaaacaaaagacttgattatgtttatttcaagtgaagaggaacccatttacattggtgctaaattgccttctgtaaattatggtaagaaggatgcatggggctttgaactttccgtaagatggagtgatgaaattaaacagtcattgcttccatcctggggatcaattaagtattctgtaggaatggattatggaatttcgtggaataagacagtattgggcaaggatgctatatttgattatccgggatatgtggctaatatgacggatttgactggttatcgcggtatgggtagtgaatatggtttcagaacatggaagcatacaagtagtggcgacggtatactccgcaatcaagccgacattgataattactggaattatctgaccgaacttgctgaagcggctggtgtttctccgaatttcttgggtattacttcaaaagaaaagatgtatcccggtatgttggtatacgaagatattgctggagatatcgatacgaaaaacaaaacgattgccggacctaatggggttatctctaaagatcatggtgaagactatgtgaaattggcggataatcgccagcatggtatcaatacgaaattgagactgcaatggggtaacttcagctggtcagctcagattgcaacttcgtggggaggattccttgattatcgtggtacacaagctaaggcggacaactttatatggagccagttctcgtatgttaatgatatgttcgatgtaattgataaccctaacggttgttacccgattatggctgccggtaatgcgtatggtgaaacctccgacttctggcaagtgtcttcattccgtatgtatgtacgtaatatgacttttgcttattcagttccgaagtctttgctgaagaaagtgaatattgatgctctctccatcaatctgacaggtaataatttatgggatttccataatccgtatcccgatcatttcgtaaacagatatgatggaataaagactggctatccaacattgagaacttggagtttgggacttaacctaacgttctaatgatgcagtttgtaatataaaaaatatgtaatatgaaaagtgttagaaatatatttataggtgcggtaggactgctcataggtatgtctgcgtgcagtgatgattttctaaaagaaaagaaggactataatagaatgaccaccgtcgatgtgtttagcgacaagacgcaggctactgccgtattcgctaccatatacaaacaaatattgtcaagatataattctcctctttgtggttccgaccctttgatgagacaagaccaacctaccggtggtaagcagtatgttttctctgaagagatgacgggttggaaaggcggtaattactcaggtgctataacgaaaaatgtaaaagcgggaaatcatataggaaatcctccttattggaacgatccgcgtaacaatactaataatttcaataattataatcgttatactttatttcccactgtctatttgataaacaattatattatagaaatagaccgttcgcgttcattgattgctgatgaagaattttggaatcacctgaaaggccaggctatgtttgctcgtgcgtggctttattttgatgctacacgtgagtggggtggtttcccatattattgtacagaagtggatatgcctggaatgaatgaccgctctttgcgtatgcctatacaagaatgcatcgataagatttgtgcagactttgaaaacgcggcgaagttacttcctgcaaagtgggatggagataactatggtcgtttcacttcggttgcagcgttggctatggcagctcgtgcgcgagtatttatggcaagtccaattttcaatgcaaattgggatgatacaagtagtaagcgctggcaagcagcattagatgcttcgttgactgctttggcagcagcggatgctgccggacatggtacgaatgtaacggatattgaatcgtgggataaggctttttataactataatggaacgttcaatccggaggctattataactgtcttaatgaatgatgagtcaatgatcagcggaacattcaataagtgggaagaaaaaatccgtcccagtgcaattgcatacaatgacggtgcggggattccagctccggatgaaatactgaaagcttttcctatgaaagacggtaaaccggccattgctgaaaatggttatgatgatgataaattctaccggaatcgcgacccacgtttctatcgtacatttgctttctctggttgcgaatggccgggaatagcaaataagcaactttggttgtttgcatataaattcagcgatagcgatggaaatatgtatcgctatacggatgggaaaaaaggtgatggcggtgcacaaggaaagagtcgtgctattgtatggaaaatgactaatcctaatatactacaaggtgcagaggcgacgagtggaacggacatcatggagtatcgttatggagaattattgttgaatgtggctgaatgttatgcggctcaggggaaagcaagcgaatgtttgcaatatttagggagaattcgtagtcgtgtaggtatttcaaatacaaacaactatggtctaggaaatatttcggaccgctatcaactgataaaagctgtgttgaatgaacgtcaagttgaattggcttacgaaggcaagcgcccatgggatttgaagcgttggctgttatttgaaggcggtgccggattcgatcccaatatcggtggtggatataatagtgcaaccggtgaatatgatcctgttgcatcatggggagcaggttggaaaatctatgatggtaaagatggaagaccggaatactcaagagtcaataatgtactgactaagttgggaatgaaacctctgtcaggtactaagcataccagtaaaatctgggggtatgatttggataatgttcatgcagttcctgagtatatcgaatcggaagtaaatcacccgttagttggcaatgaattattaaatgctgtacccgccattaagaaagatatgaatgaggctgaccgtaatcttgctttcgataagttggaacgactctgtgaaggtgttggtataaagacttatgatccgattgagaagatggggcataaatatggaatggaatccggttcaaaggagacagaccagaatttcttgtttgcttggagaggttggtattatatctatccgattcattatgatatgtatgatccggcaaaaggtaatagctggattgaacaaactgccggttggatgatagagaatagaactccttcctgtcttaccgtagacgaacaaaacggtacatattattattgtactccggaggaataataattctttctgtttacgatctgaagattgaatctgatgtaaaggtcaggttcaatcttttttattataaagtcccttactgccgattacaaaggttcatctttttcgtcctattattgataataatttatgtataattgtaaactataaaaacatgatgaatagaattttatctctccttactttattctttttttcagtagtggtatctgccgcggatataaaattaaatacgagaaatcttccggcaaatgttgtaactgaagctcagcaaaagacagctaaggtaatggacaaacttttattgcccaatgattccatccgtgagaatattcaaatcgttataacaaaccgatatctggaattaagggaaattcatctgaattatgataaacggaacaagacgattgaggcgagaggattacctaaggaagtggaagcagaagagctggaacgttcgtactatcaatataactctgatttatatcgctcccgctttggctatgaggcttggctctctttctacctgaatgataaacaagtagaaacgatcaaggatgctatgacctacaatttattccatatacgctatgacgattttatggatttgttaccaaatctgacagagtcggacaagaatagagtgtatcattggttggtagaggcacgtgagttcagtatggacttcgaaactcctcggaaaatgcgccagatgtttacaaaatatcggggacgaatcaataattatctgtccagccgtggatatgatttaagaaaagcgacagaggagcaagaggcgcgtaagatgaaaaataaatagttccttctgattacaattcttctttcttatcgtcttattattgtatttttgaaaagcaatcggacaaaaccaataagataatgaaaaataaacttgtatttttggcggcctgtgccgtcacagtgttgatgccggctactgttaaagctcagtaccctgggataactaaagaagctggagaaatcagtggaaaaataatgtctgaagggcgtcagcgctcggatgaggcatgggcgaaagctttacctattgtcgagaaagaagccaaagaaggacgtccttatataccttgggcttcccgtccggacgatctgcctcaggctaaaatcccggcatttccgggtgcagaaggaggcggtatgtttagttatggtggtcgtggtggtaaggtaattactgtaaccaatctgaatgatcgtggaccgggctctttccgcgaagcttgtgaagtgggtggagctcgtatcattgtttttaatgtagcaggtattatccgtttggaaacaccgattatagttcgtgctccttatattactattgccgggcaaacagctcctggtgatggggtgtgtattgccggagaatctttttgggtagatacacacgatgttgtagtacgtcacatgcgttttcgtcgtggagaaaccaaagttacccgtcgtgatgattcctttggtggtaatccgattggtaatatcatgattgaccattgctcctgtacttggggattagatgagaatatatctttttatcgccatatgtatagcccgggtgagggttataaagatgagaaacttccaaccgtgaatgttacgattcagaatacgatttcagctcaagcattggatacttataatcacgcttttggtagcactttgggtggtgagaattgtgcttttatgcgtaacctttgggccagcaatgcagggcgtaacccatctgtgggctggtatggtattttcaattttgtgaataacgttgtgtataactgggtacaccgttcgatggatggcggtgattatcgtgcgatgtttaatgtggtcaataactattataaaccgggaccgttaactccgaaagattctcctgttggacatcgtattctaaagcctgaagctggacgtagcaaacttgactataaagtatatggtcgtgtttttgctgatggtaatattatggaagggtaccctgaaattacaaaagataactgggctggcggtatccagattgaaaatcagagaaatacagatggctatacggaaaatatgcgtgcctatgagccgttcgcaatgccttatatcaatattatgtcagccggtgatgcttatgaatctgtattgaaaaatgtaggtgcaaatattccttgccgtgacattgtcgatcagcgtattatacatgaagtaagaaccggagaagtttattacgaaaagaaacttccgaaagatgcttatggtgatatgtggggattggcggagaaatcacaggatgaggacggtcatttcaaatatcgccgcttgccgaaagattcatataagaaaggtattattacagatattcgtcaggttggcggctatcctgaatataaaggtacttcttatgtagatactgacggtgacggtatgccagatgcatgggaaacagccaatggcttgaatcctaatgatccgagtgatgctaataaagactgtaccggtgatgggtataccaatattgagaagtatattaatggcatcagtacaaaaaatagaattgattggactgatatgaagaacaattatgatacattggcagagaaaggaaaattgatgtaattatgaaaaaaatactattactctcaatcctgctttggacgggatgggtatccgctcaggccattgacttggataaagagaatcgtgatcctaaatatgtagaatctatagttagccgttcacagaaaatagtagataaacttggtataaacgatgcaaaggttgctgaagatgtacgcaacgttattgctaatcgctattttactttgaatgatatttatgagacgcgtgacgcaaaggtgaaggaaattaaagaatcagatctggttggtgaagcaaaaaataatgcactgaaagctgcggaagatgcaaaagacgctgctttatatcgtattcattttgcatttcctgctgatttatctctttttctaactgaagaacagattgaggctgtgaaagatggaatgacgtatggagttttgaagataacctatgactcacatcttgatatgattccatctctgaaaaaggaagaaaaagctcagatttatgcttggctgaaggaagctcgtgagtttgcgattgacgcagaaaattcagatagaaagcatgctttttttggtaaatataaggggcgtatcaataattatctggctaaaagaggatatgatttgaagaaagaacgtgaagagtggtacaagcgtgtgaaagcacgtggaggctctctctgataattaggatagataaaaactggttagttatgtgatgtgaagggtggctgagaagtcacccttttctgtgttctgatttttggaatatggcgaatcttccattatctttgagtacaaatttgtcttattgccgtctcctctgtatacagaatacgatataaaaacaaaagtattatttagaaaatgagaaaattaagaaatacattagctgcaataagcattttgttcttagcttcttgtggaggaaacaaagactactatatgttcacctcattccatgagccggctaatgaaggtttaagatatctatatagtgaagacggcatgcattgggatagtgttcccggtgtttggctgaaaccggaattgggacaacaccagctgatgcgcgatccttcgatggtacgtactccggacggtacttatcatttggtttggaccaccagttggaaaggtgatttgggatttggctatgcatattccaaagacttgattcactggtcggagcaacaaatgattccggtaatggccaatgaaccgacgaccgtcaacgtgtgggcaccggagattttttatgatgatgaggctgaacaattcatggtggtctgggcatcttgtgttccggggcgttttgaaaagggtatagaagaagaaaagaataaccatcgcttatattacatcactacaaaagactttaagacgatatccgaaaccaaacttttgtatgatccgggcttcagttcaattgatgctaccatcataaaacgtgcaaagaatgattatgtaatggtgcttaaagataatacacgtcccgagcgtaatctgaaagttgcttttgccgattctttgacaggaccttattcgcctgcatcgcaacctttcacggaatcgtttgtagaaggtccctctgtagagaagataggagatgactatcttatctatttcgatgtctacaggaagaaaatatatggcgctgtgcgtaccagggattttcgtaattttacggatgaaaccggaaacgtaagtgtacccacaggccataaacatgggactattttcaaagccccggaatcgctcgttaaggagttgttgaaagaaagcaagaagaaataatatataaaacaggaacagataatgaacagccctatcaaaatactttttgttctggcaactggatggctgacactaacgtcggcttcagcacaagacaggatacattacactggaaccgaactttctaatcccacctatcatgatggacaattgtcgccggtagtgggagtgcataatattcaattggtacgtgccaatcgtgaacatccggatgcgtcgaatggtggaggatggacttataatcaccaaccgatgttggcctattggaatgggcaattctattatcaatatctggcagatccgtcggatgagcatattccgccttcccagacttttctgatgacttctaaagacggatataactggacaaatccggaaatcgtgtttcctccttataaagttcccgacggatatacgaaggcttcccgtccgggtatgcaggcaaaagacctgattgccatcatgcatcagcgtgtgggcttttatgtatccaagtccggcagactgattacaatggggaattatggagttgcgttggataaaaaagatgatccgaatgatggaaacggtattggtcgggtagttcgtgaaattaagaaagacggttcattcggtcccatctactttatatattataatcatggatttaatgaaaaaaataccgattacccttatttcaagaaaagtaaggatcgtgagtttgtaaaggcttgtcaggaaattctggataatccattgtatagaatgcaatgggtggaagaggcggatcgggaagacccgattattcctttgaagaagggatataaagcgttcaattgctatactttacccgacgggcgtattgtcagcctttggaaacatgcactgacttcaatcactgaagacggtggctatacttgggcggaaccggtgcttcgtgccaaaggattcgttaatagcaatgcaaagatttggggacaacgcctgactgatggtatgtatgctaccgtgtataatccttcggagtttcgctggccgctggctatatcgttgagtaaggatgggctggaatatacgaccttgaacctcgtgcatggtgaaattccgccgatgcgttatggaggaaactataagtcgtatggtccgcaatatccccgcggtattcaagaaggaaatggaattcctgcggatggtgatttatgggttgcttacagtgtgaacaaagaagatatgtgggtatcacgtattcctgttccggtacagatacaagcctctgcacatgcagacgatgatttctcaaaagccggatcaatagctgagttgaccgactggaatatttactctcccctttgggctccagtcactttagacggaaagtggctgcgtttgcaagataaagatccttttgattatgccaaggtagaacgaaaaataccggcttctaaagaactgaaaatctcatttgatctacaggccggacaaaacgataaaggtactcttcagattgacttcctggatgagaacagcattgcttgttcccggcttgagctgactcctgatggagtttttcgtgctaaaggcggttcccgctttggaaacctgatgaaatatgaaccgggaaaaaactatcatgtagaggctatcctttcagtgaccgatcgtaatattcaggtatttgtggatggtaagagagtaggattgcgcatgttctatgcaccggtacctgctattgaacgtattgcgttccgtacaggagttccacgaacatttcccactgtagatacaccggctgatcagacctatgatctgccgaatgccggtgaccaggagccactagctgaatatcgtatcgccaatgtgaagacctcttctgtggataaagatgcgactgctgctgttttgaagtatgcggatttcagccattatgcagattatttcaatggtatggaagatgagaatatagcccaggccattccgaatgcaaaggcttcggaatggatggaagagaatataccgttgtttgaatgtccgcaacgtaattttgaagagatgtactattaccgctggtggtcgttgcggaagcatatcaaagaaacacctgtgggatatggcatgacggaatttctggttcagcgttcctattctgataaatataatttgatagcctgcgctatcgggcatcatatttatgaaagccgttggttacgcgatccgaagtatctggatcagattattcatacgtggtatcgggggaatgatggcgggccgatgaataagatgaataagtttagttcgtggaatgcggatgctgtgctggcacgttatatggtggatgctgataaggatttcatgctggatatgaaggaaaatctggaagccgagtatcaacgctgggagtgcacgaaccgtttgcaaaacggattatattggcaaggagatgtacaggatggcatggaagaatcaattagtggcggacgtaagaaaaagtatgcccgccccaccattaatagctatatgtatggtaatgcaaaagctctttcactgatgggaatcctttcggatgatgaaggaatggctatgagatatggtatgcgggcggatacattgaaaaggctggtgaaagataagttgtggaattcacgtcaccagttttttgagacaatgcgtgcggactcttctgcgaatgtacgcgaggctatcggatatataccttggtattttaatttgccggacacagtgaagcaatatgaagttgcttggaaagagattatggacgagaacggtttttctgctccttacggattaactactgccgagcgccgtcatccggaatttcgtacccacggagttggtaaatgtgaatgggacggagcaatctggccgtttgcttctgcccagacattgacagcaatggctaactttatgaataattatccgcagactgtattatccgatagtgtgtatttccgtcaaatggaattgtatgtcgagtcgcaatatcatcgcggacgtccttacattggtgaatatctggatgaggtgacaggttattggctgaagggtgaccaggaacggagtcgttactataaccattctacttttaatgatttgatgattaccggtctgattggattacgcccgcgcctggatgatacggtggaagtaaatccgttgataccggcagataagtgggattggttctgtctggataatgttttatatcatggtcgtaacctgacaattctttgggataaatatggtgatcgttaccatcgcggaaaaggattgcgtatttttgtagatggaaaacaagttggatatgcagatagattgacgagaatcatttgtgagaacgtcttgaaataatggttactactgaaatcgaaaaaaacgaatgatgtttttaaaaagatatattttctttcttctttgcttaccgtgtctggcacaggcaaagaatataacggtcagccatctcacttgcgaaatgcaggaagggttggtgcttgttgaagcctatccccggctggggtggaccatggagtcgccggagaatgggacgaggcagactgcttatgagattgagattcgggaagcctgcaccggacgtacggtttggaatacgggaaaggtccaatcttcgcaaagccagttgataccgactcatggagcgaagtttctccgatttagtttctataactacatctggcgtgtacgggtttgggatgaaacggacacgccttccgaatggagtcgagaagcaaagtttcgtttagttccccaaggtttttcttcggctgaatggattggggccatcacccgtaaagacgcacgcttgcccgaaggacggaaattccacggaggcgagttgaagaagccggaggtaaaggcggcatgggaagacgtggatacattggcaaagaaaagcatttgcttgcgtaagatgttccgcacggacaaaaagattgcggaggctaccgcatacatctgtggccttggattctatgagttcaccttgaatgggaagaaagtcggtgacagtgaatttgctcccctctggagtgattatgacaagagcgtctattataatatgtatgatgtaacggaactgttgcaggagggcgagaatgtggcgggagttttattgggaaacgggttctataatgtgcagggcggacgttaccgcaagttgcagatcagcttcggggcaccgactcttttattctcactgcttgtcaattatgaagatggaacacgggatgtggtttgctctgacgacagttggaaatatgacttaagccccctcacctttaattgtatttatggaggcgaagattatgatgcgcgtcgcgaacaaaaagggtggaaccgggcaggttttaatgatgcgcgttggcgcccggtagtggttcaggaagctccgaagggaacgttgcgtccgcaaatggcggctccggtgaaaatcatggaacgttatggtgtccggaaagtgacaaaactgaccccggaacagattgcctctgcctgtaaatcgaccaaaagaaccatcgacctttccgctttcgtactggatatggggcagaaccttgccggttttccggaaattaccgtgcgtggtaaacgaggtcagaaggttactttggtggtggctgaggctctgacggaggaaggagcctgtaaccaacggcaaacgggacgtcagcattactacgaatataccttgaagggtgagggggacgagacctggcgtccccgtttctcatactatggttatcgctacattcaggtagagggtgccgtactgaagggggagaagaatccccggaaattgcctgttctgaaagatattcaatcctgctttgtttataactcggcaaaaaaggtgtctgctttcgagtgttccaatccgatattcaacgctgcccattgtctgatagagaaggcggttcgcagcaatatgcagtctgtatttaccgattgtccccatcgggaaaagctgggatggctggaacaggtgcacctcaacgggccgggacttttatacaattatgacctgacagctttcgctccacagattatgcagaatatggcggatgcccaacatcgcaacggagccatgccaagcaccgcaccggagtatgtcgtgttcgaaggaccgggcatggatgcctttgccgaatctcccgagtggggaggtgctttggtcattttcccgtatatgtattacgaaacctacggggacgattcgctgattaagaagtattaccagaatatgcgccgatatgtggactatctctctacccgcgcagataatcatatcctttctttcggtttgggcgactggtatgattacggtgacttccgtgcaggattctcccgcaatacgccagttccgctggtggctacggcacactattacatgattgtcaaatatctgataaaggctgctcgcattgtgggtaatgctgatgatgtcaggtattacaattcgttggcgaatgatatcgtggtggcatttaacgaacgctttcaggattacgatgcggcgcagtatggtacgggaagccagtgcagcaatgccttgccgctttttctggatatggttctgagtagaggccattctggaggttatgaaacggaccgtcatctggagcgcaaagtatttaagaatctgataaaagatgtggaagcacacggcaatcgtctgactaccggagatgtgggaaaccgctatctgatccagacattggccaattacggagccgatgaactcatctataaaatgttcaaccatgaggaaacgcccggatatggctttcaactcaagtttggtgcaacgactctgactgagcaatgggaccctcgtcagggctcctcttggaatcattttatgatggggcagattgatgaatggttctttaactcgttggttggtatctctccggacgtgaagcatggataccagaagttcagaatcgccccgaagcctgtcggtgatctgaaatacgtgcagtcatcttatgaaaccctttacggtaagataactgtagactggacccgcgagaacggccggtttaagctgaagttgtccgttccggtaaacactgtggcggtggttacacttccgggagagaaagaaccgagagaggtggagagcgggaaacatgaatttgtagtgaacgaacaacaaactataaacgaaccataaacaaccatactatgaccatgaaatatagaatacttctttgttcactcttctgcctttgtgcggttacggtgcttcgtgcagaacgtgtagatatgctgaaagcaggagcgaaggtggatggaaagacgttgaataccaaacttatcaattctaccatcgaccgcctgaacgcgaacggtggcggtacccttttttttcctgccggcacttatctgacgggaagcatccggatgaagagccacatcactttggagttggaggcgggagccactttgctgttttctgatagcttcgatgattatcttccctttgtggaggtgcgtcatgagggagtaatgatgaagagtttccagcctctgatttatgccgtggatgcggaaaatataacaatcaaaggtgaaggtacgctggacgggcagggaaagaagtggtggatggagttttttcgtgtgatgattgatctgcgcgacaatggcatgcagaatgtgaataagtatcagacgatgtgggaccaggcaaatgatacaacggctatctatgctgaaacaaacaaggactacatcggtacactgcaacgtcgttttttccgtcctccgtttatccagccggttcgttgcaaggacgtgaagatagagggggtgaagatcgtcaactctccgttctggacggtgaatcccgagttctgtgaaaacgtgaaggtgaagggagtgaccattcataatgtaccctcgcccaatacggacggcatcaatccggagtcctgccggaatgtacatatcagcgactgccacatttcggtgggagatgattgcataacgatcaagtccggtcgcgatgcgcaggggcgccggttgggagtaccctgtgagaatataaccatcactaattgcatcatgctttccggtcatggtggtgtagtgataggcagtgagatgagtggaggcgtgcgtaaggtgactatttccaattgcattttcgatggaacggaccggggcattcgtctcaagtccacccggggcaggggaggagtggtcgaagatatccgtgtcagtaacattgtgatgcgcaatatcaagcaggaggctgtggtactgaatctgaagtatagcggtatgcctgccgaacccaagagtgaacgcactccgctgtttcgcaacatacatatcagtggaatgacggttacggatgtcaagactcctgttaagatagttgggctggaagaagctccgatctctgatattgtactgcgcgacatccatgtgcagggagccggtgaggaatgtgtctttgaggattgcgaacgcatcacgatggaagatgtcatggtgaatggtaaaaagatgtatccaaaggaagtcgatgaaaagtaaacaataatatatagaacaatgaaacgtattcttttctctgtgctttttgctgcatctctttcggctgaagcacaaacacaaacatttgaaacggcctttgcccgccctttgaacgaagttcttacggacatacaaaatcgttttggtatccgcctgaaatacgatattgatacggtcggtaaagtgttgccttatgcggattttcgtatccgtccttattcagtggaagaatcgctgacgaatgtattgtcccctttcgattataagtttgtgaaacaaaccggcaatatatataagttgaaagcttatgaatatcctcggcggacagatgctgacggagagaaaatgctggcttaccttaatacgctttatgcagataaggaagcttttgaactccgtgccgattctttaagaaaagaagtccggcaacgtctgggaattgaccttttactcgcacaatgtgtggagtcgaagccgattctttccaaagtgaggaaatatgatggctatacagttcagaattttgcacttgagacgcttccagggctgtatgtttgcggttctgtttatgcccctaaatcgaaagggaagcatgcgctgatcatttgtccgaatggacactttggaggaggtcgttatcgcgaagatcaacaacagcgtatgggaaccctggcacgtatgggggctgtttgtgtggattatgatctcttcggttggggagagtcaattttgcaggttggcagtgcggcacaccgcagtagtgcagctcataccattcaggtgatgaatggtttgctgattctcgactatatgcttgctgcccgtaaagatattgacaggaaaagaatcggtgtgaatggcggttccggtggtggcacgcaaacagttctgctgagtgcactggatgatcgcttcacggcttcggcgccggtggtaagtttggcttctcattttgatggaggatgcccctgtgaaagcggtatgcctattcaattggcggcgggtggcacatgcaatgccgaattggcagcaatctttgctccccgtccgcaattagtagtgtctgatggtggtgattggacggcaagtgtgcctacactggaatatccttatttgcagcgtgtttatggattctacgatgcaaaagataaagtgacgaacatacatcttccgaaagaaagacatgactttggtcctaataagcggaatgctgtctatacattttttgctgaggtgttcggcttgaatagaaatatgctggatgaaacaaaaatcaccatcgaaccggaatccgctatgtatagtttcggtgagaaaggagaacttttgccggaaagcgcaattcgttcgtttgataaagtagctgtttatattgacaagaaagcttttgcccaattaaagtcggatgcttctcttgagaaaaaggcaatggactgggtggcttccttaaatatggaggatgataagaaagcgggctttgctgtaacaactatctataatcatttgcgcaaggttcgtgattggcataatgaacacccttattccactgtaccggagggtatcaatcctgtcactggtaaatctttaagtaaattggatcgggaaatgattgccgattccgccatgccgaaagaagttcatgaaaagctgatgaaagatttgcgcagagtgctgacggaagaacaagtagagcagattcttgataaatatactgtaggcaaagtagctttcactttgaaaggttatcaggccattgtccctgatatgacggaggaagaaaccgcttttgtgttggaacagttgaagctggctcgtgaacaggctattgattataagaacatgaagcagatatctgctatctttgaaatctacaagaccaagtgcgaacagtattttaatgagcatggtcgtaactggcgccagatgttcaaggattatgtaaataagagaaaagcggaaaaggctcagaacaagaaataaatatatcccccggaattcaaatcatgaaaagttccgggggatttctgtataataaggtgtagtcatttatgcgtatttcatgacaggcagtcatattttctgttcttacttttgatgttttccttcttttccatacaaaacaaatgatggaaggtagagttgagaggagatactaattaaaagaacagtgtgatgaaaatgaaaacattaaaggagggtattataactcatgcggatagtttgggcgagttgtttaagttttcggcggaacatacttgcaggagtatgctgcatagcttggaagagtttgctaacatggagtttgttacttttaaagaattgacggcaggattctttctcggttttgagcactatttgtgggcttcgggatgttcacgtaatacttcagcgtgctatttccgggcattgcgggctatttgtcgagaagcagaaaaggagaaagagctgaaagacgctaagcaactctttagtgaggtgtttatgggatacgaggagacgaggaaaagggcgctgagtattgaacagcttcgtatggtggcggatgctgatttggaggatacaccaagtttgggggtggcacgggatctgtttattctttcttattatctacgagggattccttttatagatttagcttacttgaggaagacggatattcaggataatgtgctttgctatcgtcgtagcaagacggggagaatgttgacgattactcttgaaccgtggatgtgggagattattaagaggtataagtgcgagaatacggattcgccttatcttctaaaaattattcggagacctggaagtataccagaggagaggaaacaatatgagagtgccttgcgactttacaacaaacatttgtatcggttatctgaacgattgggattgagggttagactgacttcatacgtagcacgccatacgtgggcgacattggcatataatgaggatatacccgtatctaagattagtgcagggttgagccatgcttcggaagaaattacgcatacttatttgaggtcattctctgatgaacaactggcggtggtgaatttgcaaatggcagcattggttaatccgatggcagaaaaggaatggaagaggaaagaaaaaggaaattataaagtgaggaaaaactctcaaaatgagcttcatatttctgttccgattcccggtaggaaacggaacgattccggcggtaaaggaacaatttccaattgaaataaacaaggaaagcaggaaatacttatcgaagtttcccagttttctgtaaaaaatcagttaaattacaacaccagacacgacaaaaacatctctcttatcctgaaagttagattttgtctcaaaaagtcatgtcaataaatattatattcctgtaataatatggtatatcagtggaaaagctctttgtattgattaaaaagctttcactttttttgtttgaatacataattcccctacccatatctcaatataggggaatctcattactaaatctaagaatagagggaaggaagagctaagaattgtctgcctttttaaaatggaagatgatttttatctgtccaatctatggttatgatagcgcccgttccgtttcctaccgggaatcggaacattccaaacaaaacagacaattatctacataaaaagcaagcgctatgttaacactcagaacaaaactcgccctggcagtactgcacgacatacagtataaggattaccagttgagtacttcccttaatccttcaccttccgaagttacgtacctgctgcaaaagctatcaaaaggacgcctaatagcactgatagaaaatcgaccggacaatcagccggatagccgccccgaatcctaccgccttgcctgtgcatatcatcaaatcaacctcctttccattcttgaagcattgggagaaggcgtttacttcaaccgccccagtgacgaaaaattctattcctgttatgggacgacagcccgcaagctgggcattgtcaatcagatgacacgcctttatctgatggaaatttccatagccgaacttcccgtgaacgaatgccttatcgagaactccataccccatatttaaactatgcaataaatccgaattgccatgaaacgactttatttgctgttcctgctgctcagtctgatgagtaccgctgcctttgcccaacgcgtggcattgcgcaccgacctgctattgtggggaactaccacacccaacgcaggagtggaaaccagcatcagccgtcattttacaatggcactgaacggggcttataacgcctggaagttcggcaatgatatgaaactgaatctctacctgatacaaccggaattacgctactggccttgccgcaagttcgaaggacacttcctgggagtgcacggacattacgcttactacaacgtaggccaggtccctttcttttcgggtatggaagacattatttaccggggcgacctgtacggtggaggtatcacttacggttaccattgggtactgggcgaccgcctctcgatagaaaccgtaattggaggcggatatgcccgcatggaatatgataaataccggtgcgcaggctgcggcgagcgcatgggacattataaaaggaattatttcggacctacacgggccggtgtgtcactcatttatttcatccgatgaaagttatggtaatcctctgttgcatactatggttctgcacctcctgcacgttcgaatttgacgaaccgggagtgtgtccctacaatgtacggctgaattaccgctatgccggcaggcccgacgccggacaactctccatgtatgtggacaacatccaccagttccttttcgatgcggacggagtgttgaaggacatccggctactgaaaggcgacagcctggagtattggcagggagagttagctcccggacgatataccctcgtggcatggggaaactggggatatgaaagcgatgtagtacccgcaccccaacccggcgtgacacaaatccgtgaactggcaatgacttcggccacgggaacagctacaggaacatccacaagcgaatatcgaccgaataccgaaaggctatactatggatatagcacgtttgaaattcccgctacgggaaattcagtaaaccggaccatttacctgacccactgccacgccgtcctccggattaccgtacattgggaagacggatactatccggcggaaggaacaggaggctatacattccgcctgcggggcgtaccttgcgaatacggctttccggcaggttacgacataccgctggccagtggtgacggagctttcacatttccctccataggcagcccggtaatatggcatcaggccaaggcggcgatgaactataacgatgaactgacgggagaattggtaacgtatcgcctgacatcaggatcacatccgttgctgagtatctaccggggtaatgagcggattatgaaggagattgacttgcaactgttctttcgtaaactgcctgtcagtctggatgaaaacacggaacaggagtttgatctgctggtaaccatcgggcagaagattgtagtgacacagctcaattcgtcggactgggcggaaggcggaggactgggataagaaggcaattaaaaattaataattaaaaattaaagaggctggatgaaaaggatgaagaaaataataggatgtctggttggggtactgctgactgtggaagcatgggcaggcggaactttaacactcggttcgcatgtctttacgcagggagacagtcttcacatagaactgctgctcaatctgagtgatgcaaaagcggggaatgcggaggcttatctgttcactcccgtgcttcgtggcgcagggcgtctgcaagagctgcccgctgtggtagtgagcggacgtcgccgtgcccgtgccgaccacaggcagcaggcacttcaaccgtctcccggttatttgcctccttaccgtacgctttatgcccgaaaccggaaagatagcattatttataaggtatccgttgcttatagcccatggatggaacacgcttcattggtgttgatgcgcgaacggcgggattgctgccggatgaagatgctcggagtagagccggtgataaccgatcttgccctgacaagccctttccatgttccgcagggacagacggtgattccgcaggcgattatcgaaagaagtgaaaatgccactaatcgacaggaaactccaagcagaccggactgtatgctctgtgccgagtgtacagccatggtgacttacctcatccccgatatggaaactcagaaacaccgttcggaaagtgccaccttatatatagactaccctaccggagtttatgacgtccgccgcgaattccacaacaaccgccccgaactggagaaactggacagcctgatgcgcccgctcaccgaagggaatctggcaaatatttcgagtatctccatctgcggttacgcttcgcccgacgggatatataaggataatgaaatactggcttccaaccgcgcacgctgcttcaaggagtatatgcgtgccacgtatgcacccgggcgcgatctttataaagtttcttccgtacccgaagactgggatggattggtggaacttctgcaacgccgccccatgaatcacggtgacgaagtattgtctctcattgcccgaaccggcatttttgaaggacgcgaaaaacaattgatggatatgcacggaggaaccgtatatcgggaacttctgaaaaactattttccgcagttgagacgtatccgtatcacggtaggttatgaggcccgcgctttcaatatcgaagaggcggcaagtctgatatatacccatccccgcctgctatcattgcaggagatgtaccgggtagccgcattctatcgccccggcacggagcaataccgtgaaatttatgagatagccgcctaccactttccggacgacgtgctggccaatatcaatgcggcttcggcggtaatcatggcaggtgatccggttagcgcacggcaatatctgaacaaggtggccgatgacccgcgtgcatggaatgattttggtgtgctggcctatctggaaggtgaccggaagaaagcggaaaaatggtttcgcaaggcactgggcatagagccggaaaaggcgaggaagaacctgaagaagatgaaatacgaggaatgaagaaatgaaaataagtaataaccgcataaaagtaacaagcatgaaagcattagctgaattctttctgtacttctcattggtgatactgtcctgcctgacggcaggttgcacctcggaggtagatataataggcggcactcccgaaacaccggagaacccgcaggccaatgaccccaaccgccgttcggtggtaatctctttgcaaaacaagctgatccttgtgaacggtacacccgaaagccgggctatcacccgtgacggtatagccgaggaggatgaaaaccgtattgaaagtttcgatatttatgctttcggcagtgacaaggaggaagggccttatacctttcaggagcatttcgcctaccgctcggatgccggaaccctgcccacaggagcttcccctatcgatttgaaagcggacgaggccgccgggaaaataaatgtggtattctacccccgcaagggtttattcaccaagttttattgcgtagccaatcaaaccgaaatgaatgatgccgcaggaaatatatacacgaattataccccgttacagcaaagttctcagacacaatccggtgtaccgggagatatagtaacaagccccggaacgcctaccgaaagcgatttcattaaattgaataccccgctcttaaatcccaccggttttaatgccaatatcctgcttgctccgctgcctatgtccggtgccaacagtcagcctaccgacttgcgcgaatacagtatgggaacttatgtgcgactgaatgtttcacttactcgcgctgtggcacgcttcgatatagtaaacgatgctacgaagtctcattttactatcacagatatcagtatgggaaacggaagacaaggtgtaacactgttccccattcgtccgacaggagatgttcccgccacaaacggccaactgattacatacccttaccgccttttcgacggactgaacgccaatgcaggaactaccaccaaggctttctattgctacccatgtaaagccatagatgcaggatttttgattttgaaaggactgtataccatgaacctgacggatgaaaagaaagaggtatcttatcgtatccctttcgaacgtgtaaccgacggtaacggtacgcgcatcgagataaaccacaaccaccgctatacggtgcagatcacagaagctgacccttttgaactgacagccaatatccgtctggtggattgggaaacaggagactatatagatgattacgagcccgacaacggattggagacaatcgcggtagctgatttgttgcctgtgggtgaaaccacttataacatcagcaccaatattgtgacactggcgctcaaagttgggagtagctttactgtttccactggatccaatgccggggtagcaacaaaactgacttataacggcaacagccctgctgacggctggttgaaactggaagaaatccccgtcactacaacacgaacaggagccacgcaacaagtaaagtacaaaatttctttcaatgaaagttacacaggcaatagttatcctcgcggtatcctgcgtctgacggataatgcaggaggcggtgaagaagtgatattaatagatacaacctttggaattcctattgtggaatccacaggtggaacaatgaatcccgacggagtaaataactgggatgcggcggataatacactctatctggtacaggtggccggcgctaatgtatccacaggtgcaataacaatcacttccataggtggtagcaaagtggaatttccagcccattcgggcattaccgttagtcctacttcaagtgtaaatactacgcaggaatatactttccaatgggcaggtacagatgctaccgacttgactgaaaaagaaatcaccgtagccttgaaaaatggttcggacgagacaaaagtcgagaacatcaaagtgaaattactgcctaatcgactcgataacttacaaataacaaatcaaagtacaggaatcagcctttcatctgtaacagccaccaccgccacgcttactatgcctgtcatcaaggacaagcaattcaccctaacaatggataattatagtaaacctaccataagcaagtgcccgtcatggctggagaacattacaccggtgtctacgcgcagcataccggaaagtaaaacagtaagtttcactttcaaactgatagaggatgcggcgaatttcgatgatacccaaatcgtattcatgaacgttgccggaggaacaggaatgacagtaaatatcacgagggaatttcaagcgcctgtgataacagctaccggtacgatggcccccagcgtgaattccctaagcggtaattctctacacatgtatcgcgttgcgagcggacagcagtctaaagcccaaataaaggtttattcgctgggaggaagcacattgattacgcccggaaattggtgttatcaacggatagtaagtactcccaataattatgagaaagtatacgaaatttattgggatggaaataccaacgaccttaataccgcctataatggttctttctacctaaagaatgtcagcgacaataacaaacaacttacaggtaccttgtatcaagatgcggcacgccccactttctcaagtgattatagttgtgtacgtttcaatcaaccgacaaatacctggtgctactttgatgtattagataacaccaatttatatggaaaatataattttacgttcaatatatattctccggcaggagtcaatattaccggatcagcttcttttggaagcattagcttttccaaaacaaagagctggagttccaattccccttatgatactttcaagttcaatatcggtggtacttcctattgcctcggaggaaatgcgacttcgataggaagcatagtatttagaagtaatagttcgacctatttcccggattatgaattcaagatgtataattacatgcccatttacaaaggttacttcgcctcatccaaggataacaagacgaacaggttctgggtatttctggagacgaccggcaaaacattcgaccaaattaaagacagcgatatgcagtctgcctatagcggttggcgtctgccttcaaaagaagagtggatgtcatttatagggaagactattcccgctgatgatagttggaacgctttcccctcaaatccaagcaatcttttcaccaccctcataccgagtgaccactgggtaaagtgtgctacgaataacccgaattacagattggattttgataggcctaataatagatggggtatagatataaatgattatgactctgctcgagagcgccgtatatatctcatatcaaaataacctgtgttaatggatctgcgattttccgttcaagcgaatttgtgatccgttgatatcagttataaggatttagaatccttcgttctttgacatgttggaatgatttttaattcaagcttcgcaagtagcctaaaagcctttcggattacttgcgaagcctgaattttagtaagtacaaattatatagattggtctatcttcatagtatcaactaataatgaagtggtacttatatgctgtaccatcttttttccccttttctttgttacttcttcaataatcagttacttttgttctattcttttcagaatgactcataaaatacatatcctcatggaagaaaatataaaaagaatcccttatggtgtctccaactttgtctcagtagtggagcaaaaccagtattacgtagacaagaccatgtacctgcccctgctcgaagaacaaccggtgagtttgttctttatccgtccccggcgcttcggcaaaagtatcttcctgagcatgctgcgggcctactacgatatcgctcagaagcctaagttcgaggcacggttcggtaatctgtggataggcagccatcccacgcccctgcaaggcgtttaccaagtgttgcatctcgacttttccctcgccaccgatggcatcagtccgcttgccgaaagttttgacgaatattgcggcatggagatggatgtgttcgcccggaaatacgaatcctattactatcccggcttcgtgcaggatatcaaagagaagggcagctttgtcgctaagctcaatttcttgagaactctggcccaagagtacggtgcccgtctgtatctcattattgacgagtacgacaacttcactaacgtggtgctcaacgaacttggcgatgaggtctaccactccctcactcatgccagcggcttctaccgcgaggtgttcaagaagtttaaaggtatgtttgagcgcatcttcatgaccggcgtcagccccgtcacactcgatgacctcaccagcggattcaacatcggctggaacctcagcgtcaaaccggagttcaatcaaatgttgggattcagcgaagaagacgtgcgccaaatgttgcagtactataaggatgccggacggcacaatggcgacgtcgaagcgatgattgccgacatgaagccttggtacgacaactattgctttgccaaagacagtttggacagcgaccccaagatgttcaactgcgacatggtgctctactacctgcgcaactacattgatgggggcaaagcgcccgaacagatgattgatcccaacacccgcacggattacaacaagatgaagaagctcatccaactggaccgtctggacggcgaccgtaagggcgtgctgcgtcgcatcaccgaggagggacggatcgtagcggatttggtgaccacctttcccgcccgtgatatcatcaagccggagatatttcccagcctgctcttttactacggtatgcttaccatcgtgggtacggacgggcaacgtccggtgctgggcatccccaacaacaacgtgcgcaagcagtactatgactttatgcttgaagagtatcaggagaagcacagcatcaacctcgaacgtcttatggaccagtttgatgccatggcctacaaaggcgagtggcgttcaggtcttgaattcatcgcccgggcttataaggaaaattccgccgtgcgcagcgccatcgagggtgaacgcaacctgcaagggttcttcaccgcctacctcagcatctgcaactactatctggttgcccctgaaatggaacttaaccacggtttctgcgacctcttcctgatggcggaccttacccattacgccgttgcccacagctacatcatcgaattgaagtacctggctgtgaaggactctgattccaaggccgaagcccaatggcaagatgccgtaaaccagatacgcctctacgctgccgccccacgtgtggagcaactgcgacagggcacacagctccattgcatcatcatgcagttccgagggtgcgaactggagagagcggaggaagtacaggtgtaaaacaaggaattaacctaagtataatcaggtaaaatgagagatgtataacatcacatattaacgcctgacttttaagcgttaccctatatttataaaatcattccaacatgtcaaacgggctttcgttctttggcatgttggaatgatttttttgtgaaactccctcccggcttttctccaagaaactcattcctcatgccataattattcgaattattaacaacggcaagactccggttttaccgatagtattcattataaatatttataaattatggcaaacgaaatcaagtatcaaatcaacggccaactggcggacaacaccgtgaccgtggacaacaaggaggacatgatcctcgtccccgtatccatcggcagtgcggacgaaaaccgcatcatcgccgaactgaaagcggaggactccggtctgcgtgaagaaaccatccgccacgtcttcgacctgcaaaaacgggtcatcaaacgcatgctgatgaccggcatgagtgtgaacacgggattgtattacgcctcagtcgctttccgcggcgtcatagaaaactccacctggaatccggcaaagaactccatcgtggtgaacttcaacgtaggcgccgacctgcgggaagccatcaaggaaaccacagtgggtatcatcggcgagaaaggcagcgccatgtacatcggcggcgtacaggatgcctccacccgtgcacaggatgcttcagccacggcaggacgcgccttcaccctcacaggcagcaagctgaaagtggtgggaaccgacccgtcagtgggtatcaccctgaaaagtagttcaggaaaggaaaccaaagtagccgaagacctttgggtgacaaacgatccctcgaaactgacgttcatcatccctgccgatctggcggacggaacgtatgaactcaaagtaaccacacaattcggcagcaacagcaagaccatgctgaaagtgccgcgcagcgtgatgaaaaccatctatataggcaaagcacccgatggaggcggtctcgggcctgatggaggtctggaagaggacccgttaggatagtccggcggcaaccgtactgctacggcaggcgtaggtggccacctacggatggcatagacggccgtctactaccggcgtagctgaccgtctacgccacccgtagcagtacggccccggaaatacctcacaataagattattaactttctaaaaaaagtatagacaaatgatgaaaacgaaaaacatgctttggatgtcggctctgctggccctgcttgcaggatgcagccagggggagcttggcaccgacgacgctccgggaaaaggagtaggcaaagagatccgtctcgtatttagtggcggaggagagtcgcaggaatacacccgcgccatcgcttccgaaagtgagaaccagattgacaacctggacatctatgtatttgcagccaccgccgacggcggagactaccagtatctggaaacgtggaaagccgccgcacaggacgacaccgcagcgaaaaccttcaaactgagcggtgccggaaccgcccgcaaggcctccatcttcccgacggaactgaagggcatccccaacctgaaactgtattgcgtggccaacagcaccacactctacaaagccgacggagacccgatagaccctctggtagcagtgaaaaccaacgccgccaccggagccatagaaaccgccggcacgaaagccacggactttgagaagtactgtaccgccaaactggagccggcaggcaccgccctgggcactccattagtaatgaccggaagcggcacaacgaagatactgggcaatatcgccacggtgaacatcgaactgaaacgccgcgtgagccgcttcgacatcgacaatgaatccgccaagacgggactgatcattgaaagcgtcgcgctgggaaacggacgcaaccaggctaccgtgatgccggggacgctgaccacactggatgatgccggtcgtactgccagcctcattaagtaccccgtagccgaaggcagctatctgatgctgcccaaagccaatcagggagtgacggagagcgcgctctatacctatcccttgaaagacacggacgaggcgttcctcatcatcaaaggcaaataccagaacccgatgcagaaagaccctgtgcccgtggaatatcatctcgacatacagcgtgctcccgataccggcggagcgactgcattcatagacgtagtggccaacacccgttacaccctgcacatcaaggaagtgatggaagccaccatcaccgccttctttgaaattgtggactggaccagtggcggcggagtcatcgtcaagcccgataatgccgcgcccgtagtgaccgccctgaatgtggaaggaaccgatgcggacgtcgccaccaaagaaatcagtgtgacagccgacggtacggagaaaatcatcacgctgaccgctacggccagcggcaaggtacagccgaagttcagcaccacaacgggatgggacattgattggctgaaacatgacgatgccagttacaagtcggaagtcgtggacggagtgaccaccactaccatgaccttcaaatatacgctgactgccgctactccttatgttcccgttacactgaccctggccaatgaatcggcttcacaggatgaatcggtttatactacgctggccattgtgccgcccgccacgacaccggtactggattttgccacaccggatgcggctacggggaacttcaacttatacgatcaggcgaatggtaaactcacgatgtacaaaacgagcaagagcagcatcacactcggggcaagctgtccgttcggaacgaaattagtattgaataatcagcttccctggctggaagtttcgaagagcaaatcaggccctgcgccaagcacgacgggtactcccgccacggatgtttctgtttctactccggtggaagagtactatacgcttatgctgaaagacgtgacagcaaccagcgatgtaaacagcaagttcgagattatcaatctgggagatgcaactcagacactggaattgacggtggaattgctcgatcctgccattacaacgattgaactgacggggacaacgggcggagccgcttacaataactataagattactgatgtgccccgcactgacggaagcactgttgaggtaaaaattacttctccgcaaggcgtgacggcaagcacgctgtcgtcttggttcaccattgccgagactgccgcctttacaagaaccactccgacggatgctaccggcagccagacattcaccctgaccgtgaaggatgccgttaccgacttcacagccgcgccgattgtgctgaaaaacaatatctcgggcatggaagacgtgacagtgctggtgagtgcgacggccgtggctccttaattcagtaacccattaataacaataagattatgattaaaaatagaaaacagttttccgcatgggtgataggcctgcttgccctgtcccttgcgggttgcagcgaagcggaagtgccgtcggcgactactcccggtgatgatccgctggtcaatgacccgacgcgccgcgaaatcatcctcggctttcagaacaagctgaacataaagacggcgggcaccacccgcgccgatgcccccatcgccacgaccgaggagaatgaaatcacttcactggatatttacgtgttctcttcggacaaggaagaagggccatatacttatcaggaacggttctgttaccgttcggacggttctacgatacctaacgctacgaaaattatattgaccgtggagggtgacaacgtagcactcgccaccctgcgccccaagaaaggcctgttcaccaaattctactgcattgccaatcagccgaaattgctgaaagccggagcggaatacaccaatttcgtagcgctggaacagagttcaccgggtgcggactataacattgtgaccaaagcggggattcccactgaaacggattttctcacctttaccactccgttgctggaccccaccgaggacacggacattttgctgacacccctgccaatggtaggttcctacagtcccgcactcgacctgcgggatatcagtatgggctcccgtacccgcatcaatatgaccctgtcgcgtatcgtctcccgtttcgatatcatcaatgacgagaaattgtcacatctcaccatcaccggcgtatcgatggggcacggccgcaaaggcgttaccttctttccggtggttcccgtggaagatgccgatccggacaagacgcttatcacctaccccgaccgtgactttgacggcgccaatgccaataagggaacacaaacaggggctttctacagctatcccagtccgattgccgacaaggggtatctgattatcaagggaaagtatgcgctgaaccagacggatataccgcaggaggtgagttacatggtagagtttgagcagtcggtagcgggcacgggcggttacatcgaggtaaagcccaaccaccgctacacggtgcgcatcaccgacgccgacccgttcaagctggatgtgaacatcaccgtttcggactggacggatggcggggactttgagtatcagccggaaaatgagctggctatcgggacactgacaggagtgggagcaaccactattgcgggtaacaatacagccaccgtctccccggatgagactgagtatttcagtattcctttcaccagcaattcggaagcggaatgcagcattgtctatacaagttccgcgggtggcagtgccgagtggttgaagacggaaatcacgccggtaacccgtgccggatcggcatcttatacttgtaaagtgtcaaaagccgatagctattcagggaaccttttcccgaaagccatcatcttattgcgcagcaaagcgggacgcgaagaaagccagattgcagtgaaagcagccgtaggagtaccggaaattgccgcggcagcagttacaccgtcagaaccggatgcggcaaatacctacactgccggaagtgaatcaccggatgtgatcacaggaacacttagcatgaagaaacaggccaatgccggaaccacctcgtccatgaaacttactgtgactgccaaaggcggtagccggattgtaggtttacctgcctggctgaaaacggataagacggaaggacatagcaccgaggctatagactataccttgacgctggaccaaaatgcaaaggatttccccacaggatcgttcccggcaaatgcggcggcaacctttgagatacagaatctgtcggatgcggcaaagaaggtgactgtaacggtagatgtgacggaagcactgacagcgccataaagggaaaatggacaaggagcgacgaaacgttgcataaggaaaaacttctaggaagaaggaatcataacaaaaacttctgagaagaaaaaatgagcggatgtgccagatttattttcggcacatccgcttcgcttgatatacggaaaatttttatcgaagttttgataaatctatttccgcatatttaacccgctgccttctccatgtataaacagcatgtagcctaccatcttttccctgaataatacttggataggaatattgactgatagggctgtcttccaatgtaagcacaggttgccaatttataccatcttctgaaatggctacacagagaggagttcgaggtcctttgggagtgccgggtagtgtcgagaaattattgtagatgagtacatggcgaccgtcctgtaatgttacggcatccgttcccgaattattattcggaacatccagaagtgttactttgctccaggtatcgccattatcattgctccaggctgtggcaatccgggcattgcgtgtgcggcacaatacttgtaatcttccgtctttgtgcatcagtatactgggctgtatcgcatatattggttttggaccttcacctttgacggcttcgccaccttcctgatcatctatgttgacacctccttttttacggtgctgagtaagtacggaaagctccgcagccagtgattctgttgtcttccaggtcttgccgttgtcatcggaaatttcgaaatgaatgcgccatcccttgccaccttctctgctggaaggacagatgatacgaccattaatgtactccggtttattcttgataggaccgaggaatccttccggcaacggttcacgtttactccaggtctttcctccgtcgcgagagcgcacgagccagcccgtccagtcgcctacgttcaagcctattttatagaagagaatcagatcacctcccggaatctggaaaagtaccgggttccagcaagctttccggcgggcaaccagttttccccgggcatttgtcacaggagtacaagtggaatcaatgcctgccaaggttgcctgcgcatcttttattgaaaatacgccgtcggcagcgagttgtggagaggtccattctttggcacctttcggcttgcgacacacccagatgcaacaatccggattgcgctctttggtaccgccgaaaaacgaagcgacaagatccccgtttttcaattctacgatggtggctccatgacattccgggaaggaggctttctcatataggaactcgtcactcaggatagctacattccgggtagggatatctacactgaagtgatgcttgcccgaacctaccatttctttccgcccgccgggaagatatacttcgcctgtagtgttggcggggagttcaatgtcccattccagatgtgtcggggtctttttccaccggctggttatttttccgtagatgcttgtgtaggaggcatctacattgcttagttcctgaatgtcaaaggcaggctggaagatgatatatttatagccgggcttccaacggtcggcacggatgcctgccagattgttgaagcaccagggaagcaggtcgcctaagagcatgacgtgatttccactgttcattccgggatttgctttgtcgccattccagagttcccagatggtggtggcgccttgcgcggccatatatccccacgaaggataagtcttattagtggccagaagataggcgacatcggcatgaccacggcggcttagttcgcgtagcagccattgtgtaccgatgactccggtgctgatatgtcttttattggtagtgataatggtagccacggtattcttggcaacttcatccatgtactgtttggggacaagtccgaaagcaagcggcagaatattggcggtaaccgtgttgttaccgtagaagatgctgtccggatataaagtatgtccgggtacgggggaagtaccttccttcacatgaaggaaacgtgcgttgaaggcatcttttatccggccttccagtgctccccattcttcggcttcggcggttaaaccttgcaggcttgcaaaacgatgcatcagttgcaggactttcagatagtaggcggtagctataagcgcaccatccgttttgcgggcagggtcattgctatgaatcatttccaaagactcgggaggtacgcaccagtcaccgtatttgtctttggtaataatgaattccttggtcaggtaatactcgcggatatgagatacccatttctttaaagccggataattctcttcgattgcgcgccggtcaccgtagttggtgaaaagcatgtcgcataccaggggaagggtagctggccaggtgacattatccgaatagtaattccaataggccggagctacatccgggatgcagccgtcctcacgctgtgcttcacgaatatcacgtgtccatttgttgtatagggcatgattgttgaaaaagaggctttcaccccaggaacccatcgcgtggtctcccaaccaaggttggcgttcgttgcgttgcgggcagtcgacgggcatacctttgtagttactgcggataccccaaaaagcattgcgcaatacctgattgagtgtttcatccgagcaggtgaaggtcccggtatgagccatttcgtcatctactacttcagctgtaaaatcttcggtcttagcattgggataaccgctgatttccacatagcggaaaccgtggtatacaaagcggggagcccaggtggcatcttgtggttcacgtccgctgacaacatatatatccgtgcaatgtgcgtcgcgtagattcttcgtaaaaatttcgccatccggttgcaagcgctcggcaaagcggagacggatactgtctcctgcctggcctttgatacgaatacgtagccatcctgccatattctgaccgatgtccaaaatctgtttgtctccctgtttccggatagaaacaggcttcaggctttccgttactttcatgcccggcatcatttgcgcacgcaaggttcctgagggaatgctgacgcgcccggcgggtatccaattcgtatcatcatagcctgtccgattccagtctcctaattccttgcgtgcatcgtattcttcgccatcgtactcattattgctgcgtatagggccttcggtggttagtttccaggaaatgtccgaggcgattgtctgtctgctgccgtccgtatattcaacaatcagattcagacgtagtttgggatagccgaaagtaggtatcttgtagggtttgtaattctggcgcatggtgtagaagcgcccgttgccgaggatgacaccgatggcattttctttttggagttggggggtgacgtcatacgtgttgtacaggatagttttccggtaatcggtaggggcaggtgccaggacttgttcaccgatgcgctgaccgttgataaagagttcgtaaagtcccattccggcaatgtgtactgtggctcgtttcacttctttggtcagtgcaaactctttgcggaggtagcgggcggcaaggcggctccattgtgtctcgctgtcaccgggggcggggcggtccaggccgatccactgcccttgccagtctgcttcattcagtaatcccatactccaggaggcgggttcgctccagtcggtttcattagtatgggtatagacttttactttccagtagtaaggggtgttacgcttcaacgtttcaccttgataagtgatccattgggaagcgtctgttttcaccttgcccgaatcccagcagtctcctttgccttgtgccaggagttcaggggaggaggctacaagaatatgataggcggtctgcatcacattttgttcgtccgattcgatacgccagcccagacgggggtggcggatgtcgattcccagtggattcttcaattgctctgttcgcaggtcggtgacgcgcaaggctgcgtgtgccgtaccagcgaggatgaggaggtaaagtagggatattgatatcttcttattcatattgattacgttatgatattgagtaatagttcaagattactttttctcccatcgctgttgtgcatcgggcagttcgtcccattccttatttacatagtctttactgctgtccactacaatcaagatatgatcgtttccgctgctgtagccactatcgtgctggaaattgtgtattccgttttcaaactcaccgatatattccagtttgccgtctttggtggtataccaccaggcattcttcttggcaccgctgattttgctgaaatctactttcatcggacgtccggtgtagttgtacaccatcagataatctttgccgcgtgtagcgatggcgcggtcgtagcgttccccgtttgtgccggcaatgatggactggtcaggtatacgttcgaagaatgggaaagtcagcatcaggtttttgagatacttcatttggttgaagcccggattgttcagagcatcgtaccaaggttcctttgcaccgtatgcaccgccaacacccggtttaatgaattgcatgatggaattattaccataggtatgtccaaaagaaccagcaaaaaccgaccagtaggcataacggcgcacatcgtaatctttccagcgcagttcattctcatcgtgcagaccgtgaggaatttcctcgtagataggttcaccgtcaattacgggtttcatgggatttgtggccatactgcgttctacaaagcgccagttatcttcttcggtattctcttcgattggataatcaccgtcaccgaaacgttgcccgtagcggcgatgcccgctttggaacatgttgaagtccagccagggagcggcattgaaccaagttgaggaaatggtacggccgcgtgggtggaaggtcatcaggtgattcttgtctattgctttgatggatgtggcgagagcttcccattcagcagtttttacgtcaccacgaatatcgcctccgataaaccagatgatattcggctcgtctttatagcgttcggcgaggaatttgccgtaagctttggcttgctctaccgtcatttctccgcgactcacaggactgccccagatacagaccataccgatataaagtcctttccgggcagctgtacggataatgtaatccatgtggtcccaatagccgtatacgcctttctgattgatgtttttgaagttatatccatcagtcatagaatattgtccgtaggtatttatggaggggacattattcagggtctgaacttgaatgacgttatatccccgttgtttacattgttccagataatactcggcttcatcgcggttcagacgttgaggtagtagccatccggtttctcctagccaaaagaaaggagtgccgttttcatgtttcagatagcgaccttcttcggagaccattagtttaccattgttccaggggatatacgttttctgtgttttcttctgtgcagaggcgggcattgctacagtcagcaaaagcagaagaaaagggattagtttgaatgttttcattgttattgatgttattataattgtttgcttaatcactaattcattcgttcatattcaattgccgccaatatgaacgtccctacggatttgggatcattttctatcacgggttcgccaatataatactcgaacgagccgtcacgatactttccggagttcccgcccagtccggctacggcacaacaatgggtcaatgtgtaagtgccgtcttcttcaagacgggtgaactcacggatcatgccgttgaatgctttctgtacaggggtgatgtattcgtttccgatatatccctgattgatggctttagcaagtgtatatatgaacagggctgttgccgatgattccagataattacccttgcgtgctccctggtcggtcacttgataccaggttccggattgcgggtcctgatacctcaccattgcctgtgccaggccttgtagaatttgcagtatgctgtcgcgtccttcggtttcctgtggcaagtaatccaatacatccactatggcggctccataccatccgatgctgcgactccagaaattcggtgaacaacctgtttcccggcttgcccatttctgctcgcggctttcatcccatccgtgataatagagtcctgtagccggatcataagtcttgcgggctataagcagaatttgtttcacagcttcgtcttgcagggccggctccccaaaagtggcgccatattgcgccagataaggagaggccataaagataccgtccagccacatctggtgcggatacctcagcttgtgccaaaaaccgccttcgcttgtgcggggctgctccctcatttgtttgcgcaaggtgtccatggctattttatagcgttcatctcccgtttgggcatagaagtcgaaaagaatctttccggcattgacgttgtctatattgaatgaaagatatttcatggttctgatgtgtccatcgttatcaatcagactgtccgcatagattttggcataatcgtagtaagtgctgtctcctgtatgcttccattcttcgagcatggattttactacaagtccgtgtgtatatccccagcgcggtttgctggccttttcaatcatccagggttcaggaaaacgcttcatttcggagcgtgccatgcgctcgctccatttttcggtctttggtttttgggtggttgtgcaggccatgaaacaggtaattccgcacaccgtcagtagtttcagtgagatacgattcatataagttcagtatttagtttccaatcaatgtatattcttgtcctgcccgggtgggcagatcgtataaataggtctttgctatttccactttgttcaatttggcttcggggctgattaacggttgggcaatgatgggaactgcataaagcgggttgggattctcacctttggcacgtttcagacctttgcctgtcaacggactcgttgagcgaaggcggcaattgcctcctttatgggattttacaaccagacgctccactttcccgtttttccagcttagttccagctcgaaacctccgcgggcgatgattcctttcacagttccgtccttccaaaccgtcggtaatgcgggtagcagatagatgaaaccgtcatggctttgcatcagcatttcggcaatgcctgcggcacaaccaaagtttccgtcaatctggaagggtgggtgtgcatcgaacaggttggggtaggtgcctcctttctttttttcattacgcaccagggtcagttggtctgtaatgagcttgtaggcatggttgccgtcgagcagacgcgcccacaggcaaactttccatcccatgctccagccagtggatgggtcgccgcgatgaatgagggaagtgcgggcagcgtcgaataattccgggctgcggtagggagatatctggttgcttggaaacagtccgtacagatgggaaacgtggcggtgtacatccttcgggtcatcccagtcgaacatccattcctgcaactgtccccagcgtcctacctgcatgggagccatttcacggaggcgctgtgagagtcgggcggcaaatgcccggtctgtatccaggatgtccgaggcggctatgatggctgtccaaaggtcgaatatcaattgattgtcgagggtgcatccggcagctgtggtagacttgccgttactgcccgaatgtacattttcgggtgagttgctgggacagaccaccagccagttgtgcgcaggttctttcaccatgatgtcgtcgaagaagcgtccggactctctcaagatgggatagacggagcgcaggaattcagtgtctccggtgtagaggtaacgttcccaaagatgccggcaaagccatgcgccgccactgggccataagcctgacggagctttgtctactgcgcccgtgatgcgccatatgtcggtgttgtgatgtagcacccagccattggcgccatacatgatgcgagcggtttccttacctgtttcgctgacttcgcgtatcaggcggaacaggggttcgttcagttcgctcaggttggtgacttccgagggccaatagttcatttccaagttaatgttacaggtatatttgctgtcccaggaggggaaaagcttatcgttccagattccctgaagattggcgggttgcccgtcgggttgggatgaacaaatcaggaggtaacgtccgaattggaaataagtagccaccagatgtgcgtcattggtctgtttgaagttctccacgcgcttgtcggtagtcacgtgttcgtatcggttgtctcctaaatccagggagacgcgtgtcaggtatcggcgataaaagtccgtatggttcttccgggcttcagtgaatgaatgtgtcatagcttttaccagataatctttggcacgttcggctggattgcctgtgatgtcctgatagttattgaagttggtggcgatggagacgtagacgatggcttcatcggctccttctactgaaagcacaccgtcggcacatgtcatccggccgccggtgttccgggcggtcagtcttccctgaaactccactttgcctttcagcccttcgtgcagggaagatacgccggaaagtgttacgcagtttccttcttcggaagtgatgacgacatcctgatgaggggaggtgagttgagcgttgaaagtaatccgccccggacggttggcggtgaggcgtaccatgattacctgatcggtaaatgaagtgatggtttcgcgccggtattgcaccccatccacttcatagcggacgagggtacgggcagagtcgagacttagttcccggtaatagttcgtgtaacgggtatgtccgggaaacgcgattcgcaggtcgccaaagctttgatagggcattcccgaattggtctttgccatgaccttttcggtggcgagcgtctgtgcttccagatatttgccggcaaataccaggtcgcgtacccggggaatgtattccagtgcattggggttggcgttgttgttggggcgtcccgcccagatggtttcttcgttcagttgtatctgctccgtggcgggcgtgccgtataccatagctcctagacgcccgttccctaaggggagggcttccgtccatacttgtgcggggcggtcgtaccaaagtttgtattcctgtgcggacaggcgtgactcctgtgcagaaatattgcccacggataccagtacaaacagatagccgaataatctctttttattcatcttttctaatagcttttatacttttagaaaaggacggttaaagatagcttttgtacccagcaaataggtgataaaatgtcgtattaatccggtcattgcatgtaatagcacttgctggaccatttcttgttgagtacaaaacgcgcttcattgcgtctcttctttaaagatattgtatgaaatttcagatgattcatattcatgagacagattaaactgatacttcttttagcttccgcctccgtcacgggagcatttgcacagaacaacggactgacggatatgagctggagccgctacgcccggatggtgaacaccggcattgatgccgtacattggacggatggcttctgggcagagcgctttgatgtgttcagccgcacctccctgcaaagcatgtggaacacctggaatacgcccgaagtatctcacggtttccgtaattttgagatcgctgccggcatttgcgagggcgagcactggggaccaccctttcacgatggggacatgtataaatggatggaaggagtagcctcagtttatgcagttaacaaagaccccgaactggacaaactaatggaccgtttcattacttgcgtcgtaaaggctcagcgaacagatggatatatccataccccggttattatcgaagagcttaataaaggaatcgatactcatactctggaagagccgcataagcaaacagtcgtcggaaccaaggtaggatccgaagatgagaaaggcgcctttgccaatcgcctgaactttgaaacctacaatctgggacatctgatgatggccgccatcgttcatcgtcgtgtcaccgggaagaccactctttttgatgcagccgtccgtgccaccgatttcctttgtcatttctatgaaaccgcttccgctgaattggcccgtaacgctatatgtccttcccattatatgggggtagtcgaaatgtaccgcgccacggggaatccacgttatttggaactgtcgaagaatctgattgacattcgggggatggtggaaaatggtacggatgataatcaggaccgcattcctttccgtgagcagtaccgggcgatgggacatgcggtacgtgccaattacctgtatgccggggtggcggatgtctatgccgaaaccggtgaagagcaattgatgaagaacctgaccagtatttggaatgacatcgttacccggaaaatgtatgtgaccggggcttgtggtgccctttatgacggcacttcgcccgatggcacctgttatgagccggatagtattcagaaggtacatcaaagctatggtcgcccttatcaattacccaatagtacagctcataatgaaacctgcgctaacatcggcaatatgctttttaactggcgcatgctggaagtgacgggagacgccaagtatgcggagctagtggaaacatgtctttataacagtgttctgagtggtatcagtttggatggaaagaaatatttctatacgaatccgctccgtatcagtgctgatttaccttatacacttcgctggccaaaagaacggacggagtatatcagttgcttctgctgcccgcctaatacgttgcgtacactctgccaggcacagaactatgcttatacattgggttccgaaggcatttattgcaatttgtatggtgcgaatacattgactacaaactggagagataaaggagaaattgctttgacacagaagaccgcttatccttgggaaggcaatgtacgtgtagagtttgaccgggtgccccgcaaagccggtgccttctcccttttcctccgtataccggagtggtgtgagaaagctatgctgacagtaaatggagagccggttccggttgccgcaaaagcaaatacgtatgcggaggtaaaacgtacctggaagaagggggatgtggtagagtgggtgatggatatgcctgtccgcctgcttgaggctcatccgttggcggaagaaatacgcaatcaggtagtggtgaagcgcggaccgttggtatattgcttggagagcatggatatgacaggtggcggaagcattgataatgtactgatccctgctgatatcaaactcattccaaagaaagtgataattgaaggtagtccggttgttgctcttgagggcaaagctcgtctgatttcatccaattcctgggaagggatactttaccggcctgtcagtttcgccgggaagacggtggatatccgtttgattccttactatgcttgggggaatagggggaaaggagaaatgaccgtttggatgcctctggggagataaatacagatacgcgtcgtccgcgtatctataatcaaacattatgtcgaatagaagaattatactaataactgccttgtcgctcctcacctttgtagggcatgcaggcgatatttgggtttccccacgtggaaatgatcagaatgatggtacccgccaatctccgaaggcaacactgacctccgccctgcgtcaggcacgcgagtggcgccggacaggagataatcgtgtgctgggaggcatcacagtgtatatggagggcggtgtttattccctctatgaaccggtattcattcgtcctgaagatagcgggacaaagggttcgcccatcgttattcgctccgttcgtggcgaggatgccgtattaagtggtggtgtgcctatcaggaactggaaaaaacaaggaaaactatgggtggcggatgtaccgatgttcaatggccgtccgctggatttccgccaactgtgggtggatggacagaaggccacacgtgcccgtgatgtggaggactttgagaatatgcatcgaatttgcagtgtcgacgagaagactgaaactctttatgtgcctgccgccgccgttcggcagattacggatgggaaaggtgcgttaaagtcaagatacgccgaaatggtgcttcaccagatgtggtgtgtggctaatcttcggattcgttctgtgcaggttttgggagatagtgcggcagtccgtttccatcagcccgagagtcgtatccagtttgaacatccctggccgcgtcctatggtaacgaccgatggacacaattcagctttctatctgaccaatgcacgtgaactgctggatgttccgggagagtggtatcatgatatagatacccgtaagctttattattatccgcgtgagggagaaaatatgcaatcagcggaagcgattgtgcctgctattgagacattagtgcaaattgaaggtactttggatcgtccggttactaatcttcgcttcgagcggatcactttctcatataccacctggatgcgtccttccgtaaaagggcacgttcctcttcaggctggcatgtatctgacggatgggtatcgtatcgatccgaaaatgaaacggaattacaggaatcatccgttggataaccaaggctggctgggacgtcctgcggcggcagttcgggtggctgccgcaggggcgatagactttgagcgctgctactttgagcatctgggctccacggggttggattatgaagaagcggtgcatggaggaatcatccgtggctgccttttccgtgatattgcggggaatggtttaggggtcgggagtttctccccggctgcccacgagacgcatcttccgtacgatcctgccgaccgtcgtgaagtgtgcacgcatcaacggattgacaactgttattttacagagacgggtaacgaagactggggctgccttgccattgccgcaggatatgtaagcgacatccatatcgtgcacaatgaaatatgcgaagtgccttatagcggcatcagcctgggctggggatggactcagacggtgaattgcatgaagaataatcaggttcatgccaatctgatccatcactatgcgaagcacatgtatgacgtggcaggcatctatacgttaggttcgcagcccaaaacttatgtaacggagaattgtgtgcatagcatttataagccgggttatgcgcatgaccctaaccactggttctatctctacaccgacgagggttcgtctttcatcaccgtccgcgacaattggacggaaggggagaagtatctgcaaaatgcgaatggacccggaaatgtgtgggagaataacgggccgggagtggatgcggctattcgtgaacgggcagggctggaagaggaatataaagacttgaagaataaatgataatttaccagcgtagcgctggagcaaggttctccttcggcgtgcaagtaatctttcagacacggatgacacggatgacgcggattttttttccttcggtgtgatatgccggtatgtatagcgcagctttaaaaatccgcgtcatctgcgtctaaaagattaaagtccgcgttcgtccgccttatccgcgtagtccgcgtacccattccctcgccgctaaattatcattacaacgaatctggaaatcttaattcaatattatagtagaaatgaaaaacagatggatcgtagttttggttgccatatcattggcaacttgcacttttgcccagacctggatatggtatccgggcgattatgaaatatggttaggcaaccggatgaataaccgtcgtacggagcggggtgctttttttcctcctttttggaagaccgacagccactatgtagtcgtggaattcagcaaacaactgaacctttccgaaccggaagaaatcttcattgccgctgaaggaaagtataacgttaagctggatggaaaactccaattcggtatgccggaaaccttattgcttccggccgggacacataatttgaatattaaagtctggaatcaatcgactccccctgccatctacgtaaaaggtaagactgtaaactccgatgctacctggcgtgtgacttatgaagacaaggaatggattgacgaaagcggcaaagccagtgacacctcagccaccatctatatggatgccggctgctggaactttgacggagccacacaactcccttcccaattccgattgatgcggacactccatcagcccacctcccgtgctacacaacccgaaggaggcatcctctatgatttcggaaaagaaacattcggttacctcactctgaagaatctctccggtaaaggcatcatcgacatctattacggtgaaagtccggaagaggcgaaagacaaggcatactgcgaaacattggataaactgcaactggaagcaggacaagtcactgatcttgccatccgccaaacatccccgctgtccggtatcgaaaacgaatataccctggaaaacagtaaggctttccgctacgtctatatcactcatgaaccgggggtacagataggtgaggtatctatgcagtacgaataccttcccgaagaatatcgtggaactttccgttgcaatgatgaagaactgaaccgtatttgggaagtgggtgcctacactatgcacctcactacccgtgagttttttatcgacggcattaagcgtgaccgttgggtgtggagcggagacgccattcagagttatctgatgaactactatctcttctttgacagtgagtcggtgaagcgtactatttggttgcttcggggtaaagatcctgtgaccagtcatagcaatacgattatggattatacattctattggtttctcagcgtctacgattattacctgtatagtggtgaccggcagtttgtcaatcaactctatccacgtatgcagactatgatggattatgtattgggacgcacaaataagaacggtatggttgaaggtatgtccggtgattgggtatttgtagactgggccgacggttatctggataaaaagggagaactctcttttgagcaggttctgttctgccggagtcttgagacaatggcgttctgtgcagggttggtgggagaccggaccaaccaacagaaatatgagaaactggctactaccttgaaagctaaactggaaacgacattctggaatgcctcaaaacaggcccttgtacataacagcatcaatggtgttcagagcgatgccgtcacccgttatgccaatatgttttccgttttcttcaactatctgactccggagaaacagcaggccatcaaacattccgttcttttgaatgacagcatcctgaagatcacgactccctatatgcgcttttatgagttagaagccctttgtgcgcttggtgaacaagaaacagtgatgcaggaaatgaaagcgtactggggaggaatgttgaaagaaggtgccacttccttttgggaaaaatataatccggaggaaagcggtacgcagcatctctccatgtatggtcgtccttatgggaagagtctgtgtcatgcttggggagcaagtcctatttatctgctcggcaaatattacctgggagtgaaacctgtgaaagaaggctataaggaattctctataactccggtattgggaggtctgaaatggatggaaggcagtgtacctacaccgaacggaaatatacatatccatatggaccggaaaatgattaaggtacgcgcaacagaaggcaaagggtatctgacgataaaaagctgccggcagccaaaggctaatattggaactgtggaaaagattgatgagaatacctggcgcctctggatagatactccggaagagagaattgttagcggattgaagtactgaaaggcagaatatgagtacaaacggatacttattgcgtctttttactataaactcaggtttggcaagtgtagtgagtaaaattatcatttgtaagcttctctcaaagtttaccacacttcaatataaagtaaaaccatcctctcctcttctttcgtagaaagagagagagttatcataaatagaaatatgagaaatatcagattattcatgtttgcggcatgtacactcctttttgcagcgtgcggcaagcaaaccgtgaagattataactccgccggatgcgtcgaatcgtattctgtttggtgcggaacagttacaaaccactctggataaagcgggctatcaggttgtgatgcaacagggagatactatattctccaacccggatgttcgaaccatcctgctgacagaaaccaatgatacgactttaaagaaagaaggctttcagattacaacagtcggtaatctgacgaaagtatccggcagggatggcagcggtgtcatctatggatgccgtgaactgatagaccgtgtgagtagttcaaaaggcaaactgaaccttcccgagaagctgacggatggaccggaaatggtattgcgtggcgcctgcgtaggattgcagaagatgacttatctgccgggtcacggtgtatatgaatatccttatacaccagagagttttccctggttctatgataaagaacaatggattaaatatctggatatgctggttgctaatcgtatgaactcactttatctctggaacgggcatccgtttgcttcgttagtgaagctggaagactacccgtttgcattggaagtggacggagagaccttcaaaaagaacgaagaaatgttttctttccttacggaagaagcggataaacgtggtatctttgtgatacaaatgttctacaatatcattctttcaaagccgtttgccgaacattacggtctgagaacacaggatcgtaaccgtcctattactcctttaattgcggattatactcgtaagagcattgccgcttttattgagaaatatcctaatgtaggattgcttgtttgcttgggtgaagccatgtgtactgtggaggatgatgtggaatggttcacaaagacaattatccccggagtaaaggatggattacaggcacttggacgtacagatgaaccgcctctcttgttgcgtgcacacgatacagactgtaaattagtgatggatgccgccctgccgctctataagaatctttataccatgcataagtataacggtgaatcactgaccacttacgaacctcgcggaccatgggcaaagatacatacggatttgagttcactcggttctatccatatcagtaatgttcatattctggcgaatctggaacctttccgttgggggtctcccgattttgtgcagaaggctgtaaaggccatgcacgatgttcatggtgcgaatgccctgcatctttacccacaggcttcttattgggattggccatacaccgccgacaaattaccggatggcaagcgggaatttcagcttgaccgtgactggatatggtatcagacctggggacgatatgcatggaactgtcgtcgtgatcgttcacaggaaattgattactggaatcatcagttaggtaagttctatggtacatctgatgagaatgccggactgattcgtgaggcgtatgaagaaagtggcgaaatagcaccgaagttgctgcgtcgtttcggcatcacagaaggaaatcgccagacattgttgctgggtatgtttatgagtcagtttgtcaatccatacaaatataccatctatccggggttctatgaaagttgcggaccggaaggtgagaaactgatagaatatgtagaaaaggaatggaaaaagcaacctcatgcaggtgagttgcctttggatatcattgcccaggctatagagcatggagataaagcggtagccgccattgataaggcagcaaattccgtatctgacaataaagatgagttcgcacgtttgcagaatgacatgcattgttatcgcgagtttgcgtatgcgtttaatctgaaagtgagagctgccaaactggtattggattatcagtggggaaaagatctaaagaatctggaaaatgccattcctctgatggagcagagcctggaacattatcgtaaattagtgaaacttacagatgagcattatctgtatgccaatagtatgcagacagcacaacgccgtattcctataggtggagatggcggcaacaataagacttggaaagaattgctggtacattacgaaaaggaactggagaattttaaagcgaaccttgttctgctggaggaaaaacaaaatggaaaagcaactactgaatcggtagatattccggcctgggcttccgccagcgtgaaaattctatctggttatccgaccgttaaattaagtgagggcgcttccctgtttactaatcttccgggaaagatagaagccatggctcctgaactagaaggattgaaagcatttcgtttcaatgccaatgagcagcgtgaaaagggaacaagtattacttttgaaacggatgcgccggtaaaacttctggtcgcctatttcaaggatgaccaaaagaagtatgccaaagcaccgaaacttgagattgatgcttcggctaatgattacggtcaggccgagccgatattgacgaatgctgttcgtatcagtggaatgccactggccaatgtacatgcatatagttttcaggcaggcaagcatacgctgatgttgccgaaaggatatctccaggttctgggatttacggatgcggatatgaaggcccgtaatgcaggattggccggagacgaagaaacaatggattggttgttttattaatactgaatcatgagaaaactatcactgacattcttttgcatgatatctgccctgtctgcttttgctcagcgtgatgttgcgcaggagcggatggagcagattttcgaagaagcaaaaacaccctataaatatggactggtggttgctccggaggataatcaccataaaatagattgccctacggtctttcgtcagggagacaaatggctgatgacctatgttgtttataacggtaagggagggacagacggccgtggttatgaaacctggctggcagaaagtgataatttgcttgagtggcgcacattggggcgggttctttcgtaccgggatggtgaatgggattgcaatcaaagaggtggatttcctgctctaccggatatggagtggggaggaagctatgaacttcagacttataaggaccgtcattggatgacttacatcggtggagaaggaacggggtacgaggctgtgaaggcaccgctttttgtcggtttggcatggacgaaaggagatttgtctactgcgcacgagtgggagtctctgaataagcccattctgagtatccatgacaaagatgcccaatggtgggaaaagctgactcaatataaaagtactgtctattgggataaggataagacgttgggtgccccctttgttatgttctataatgcgggaggccgccatccggaaacaggtctgaaaggggaacgtgtagggatagccctttctaaagatatgaaaacatggaaacgttatcccggaaatcctgtttttgcacacgaagctgatggaaccattacaggagatgcccatatacagaaaatgggagatgtgtatgtaatgttctatttttcagcttttgaaccgtcacggagatataaggctttcaatacttttgctgccagctatgacttggtgcactggaccgactggactggagaagaccttattattccctctaaaaactatgatgaactgtttgcccataaaagttatgtggtaaagcatgatggggttgtttatcacttctattgtgcggttaataatgcggaacagcgggggattgcagttgctaccagtaaaccgatgggacgttctgccgtccgtttcccaaaaatggagacgaagaatcgtcgtatactgaccgaactgaatgaagattggaaaacatggctgattgatcattcacaaccggtgaatactaattcattgcagcgtgataatgcaatcaattgtcaactgcctcacaactgggatgattactatggttatcgtcagctcactcatggcaatctgcatggcactgctatgtatgtgaaagattttactttggataattaccaatcccggaagcgctattttcttcgtttcgaaggagtaggcacttatgccacaattcaattgaacggtcaggattttggacggcatcccgtaggacgcacgacattgaccttggatgtgaccgatgcattgaggcaaggtagcaatcatctggaggtaaaagttgagcacccggaaatgattgccgatatgccttgggtatgtggcggctgttcttcggaatggggattcagtgaaggttcgcaacctttaggaatcttccggtctgtggtgttggaaggtacagatgaaatccgtatcgaacctttcggagtacatatctggaatgatgagaaagcagctaatgtatttgtcgatacagaggttaagaactatggtaagactacggaaacgattgaagtggtcaataaattgagcaatgcggatggaaagcaagtgttccgtctggccaggaaagtgacattggcaccgggagagatgaaggtggttcgccagcactctcctgtagagaatccggtgttgtggagtacagataatccttatctgtataaactggcaagcatgattaagcgggatacgaagactacggatgaggtatcgactcctttcggtatccgtaccatcagttggccggtgaaacggaatgacggagacggacgtttctatttgaatggaaagcctgtctttatcaatggagtttgcgagtacgaacatcagttcggacaaagtcacgcgttcagcagggagcaggtagctgcaagggtaaagcagatatgtgcggcaggctttaacggtttccgtgacgcccatcaaccccatcatcttgattatcagaaatactgggatgaaaaaggtattttgttctggacgcaattctccgcacatgtatggtatgacacaccggaattccgggagaattttaagaaactgcttcgccagtgggtgaaagagcgtcgcaattccccctcagtcgttatatggggattgcagaatgaaagtacattgccccgtgaatttgcacaggaatgtagtgagattatccgggagatggatccgacggcgcgtacgatgcgtgtcatcactacctgcaatggtggggaaggaaccgactggaatgtaatccagaattggagtggtacgtacgggggagatgtcaccaaatatggaaaagaactctcccggaagaatcaactattgaacggagaatatggtgcatggagaagcatcggattgcatacggaatccggagagtttgaggtgaacggaacgtggagtgaagatcgcatgtgccggctgatggaaactaagatccgtttggcggagcaggcaagagatagtgtttgcggacaattccaatggatatatagcagtcatgacaatcccggacgccgccagccggatgaagcttaccggaaaatagataaagtaggaccattcaattataaaggattggtggctccgtgggaagagccgctggacgtatattatatgtatcgtgccaactatgttccggcagccaaagatcctatggtttatctcgtgtcgcatacctggacggatcgttttaaggaggggcgtcgccgggcgactatcgaggcttatagtaattgcgattctgtattgctctataacgatatgtctgatgggaaagtcactttcctcggacggaaggggaataatggagtgggaactcatttcgtgtgggagaaccgggatatccgctacaatgtgcttcgcgcggtaggttattacaaaggaaaacctgttgcggaagatataatcattctggaaggattagagcgggcgccttgttttgatgcgctttatcaggaagcaaagcctgtactgaagggagaagagggatataattacctgtatcgcatcaattgcggtggagatgaatatacggatagcttcgggcaactctggtcacaggataatctggggtattcccgttcatgggctgcaaattttgaaggtctgaatccttatcttgccagccagcgtacgacgtctgatccgatacgtggcacgcgcgactggacgttatttcagtccttccgctttggccgtcaccagttggagtatcgttttcctgtagctgacggaatctatcgtatcgaattttactttacagagccctggcatggtacgggaggaagtgcttctaccgattgtgaaggtttgcgcatatttgatgtaatggtgaacgattccctcgtgttggataatctggacgtatgggctgaaagtggccatgacggtgcatgcaaaaaggtagtatatgccgttgcgaagcaaggcctgctgaaaatacacttcccggaagtaaaggccggtcaggcactgatttccggaattgccattgcttctgcaaatcaggaactgaagccgtctgtgtttccggcttcagggctgaaagcttcggaactactttcagcggcggacagaaactgggtggctccggactggagttgggaggcggcagacaaagagcttttggaaaagactcccaaggaattgcttccggaagataagaatgctcgtgccagtgtggcgtatgaggctgaaacagcttctgtaaaaggtacttttacgaagagggagcatcgcaaacagatgggcgtcttctttggaaaaggaaagaagaacagcatcgagtggagtgtttctaccggattggcccaaatctacgctctccggtttaagtatatgaatacaacaggtaagccgctgcctgtacggatgcagtttatcgacagcaaaggtgtgacgttgaaagatgatatccttactttccctgaaacgcccgataagtggaaaatggtgagtaccactgtaagcattcgataaactccccctttcattctaaaaatgtgatattacttttgtaatcaaagtaaaaaagctcaattgttatgtcacatcaatggaccatggaagattttgaatctatttattcccgtttcaagtcgagcggactgtcagttatggatttttgttcgaatgaatgtattcgtcccaaacgtttctacgagtggcgttccaagctgttgcgcaaaggcggctttatcccggtaaaggtaaacagtaagggccaggtcagtcttccccataaggagaaatccctgctgtctgcccctccggtcagcccgtcgccaattccccagccgctatgtgagatctcctatcccaatggcgtcacagtccgcttgaacagccctttgtcaccggaggtattgcaaaccctgatatttttgaattcaaaccgttagcctatgttttctttgaatgaatccaacagatattatctttacccgtatccgacagacatgcgtaagagtttttatacgcttagcggcatcgtgaccaaccagatgggaaagaatgtacgggacggtgacgctttcatttttatcaatgcgaattgtacctgtatgaaaatcctccatatggaatatggtggtctggtgatataccatatgaggctggaacatgggcacttccatctgccggtcataaatacggaggaaggtcggattaaagcgattgaaaccttctggaatgaccttgtgatgatggttcaaggaatggacggcagcaaggtcaggcgttataaaaggagtggtttccatgggttgtagttgtaacaaattataacatatacaatgccgtattccggctgttttttagtatcttagcatcatatttaaacgattatgccaaccgataaggaattactgataaaggatctcatgcacaaatgcgactgtctgtatagagaaaacagccggttgaaggagatggtgtccacgcagccccttaaagctgcggacaaagaggtgtatgaggctttattgtctgacaaggatgccataatcgcccaaaaggaagcaaaaatcaacagtctggagcaacgtgtatcctatcttgaacggcagttgtacggtaagaaggcggaaaagttcataaagcctgacgcccaggaccgctggctggattttgaaggctttgacatgcttccccaggaggctgaagccgcagaagaagcagaaaaggagttgaaggctaccagagaagcgatcatcgcccgtaaaaaagcggggaagcagcatcctgcgagaaaatcccttccggagaatcttgagcgtgaggtggtccatatatatcccgaagggtataatccggaagagtggacgctccttcccggagaggaagtgaccgagatccttatgcacgagcccgagaagttctatatccgcaggatagtgcgccatacagccaaacggaagggtacaaacgagttcaagaccggcccgcttcccgtcatgccaatagcaaagagctatgcctctgcctcattgctggcagacatgatgatagggaaatatgtggatcacataccgttccacaggcaactggaacagttcaaacgtgtgggggtacatctccccgcgtcaacggtcaacgactggttcaaggatgtggcggatttgctaaggcccctttacttccgattatgggagctggtgatgcagactgactacatacagtcggatgaaacgacaatccccgtgatgaatgacgagagacacaagacggtcaaaggttatatctggcttgtgcgcagtgtcatgaccggacgtcagttcttttactatgacaagggttcccgaagtggaaaggtggtgctgaaactcttcggcaagttccggggagccatacagacggacggatacgaaaggtacgagatgctggacgccaagaaaggtattatccttcttggctgttgggcccatgcacgcagacatttttgggaggcaagaaagaatgacatgcagcgtgccgactatgcgctcgcacagatacagttgctttatgacgtggagcgtaaggctgacgatgaacgcctgacttacgaacagagggctgaacttagggcacgtcttgcatatcccatacttgtgcgcttcgagaaatggctggtcaatgaatatcccaaagtaatgaaagacagtccgatcggaaaagccataaaatatacatacggaaggttcgacaaactctccaggtaccatctggacggtcgttacagaccggataataacgagatagaaaataaagtgcggcctgtcgcgtgcggcagacgtaattacctgttctgtggcaataatgatgccgctgaagatgcggcggtgctctactcgttcttcggctgctgcaaggctgccggggctgacttccgcacgtggctgatctacttccttgaacatatacatgattatgacgatgactactcgatggatctggccgaattgttacctgacaatctgttatccaagggcaagatattatccgttacgtcaccggaatctcccaagaaagactcctgataccttcgtaaatctcgcctaaacacgggaaaactaccgttttatgccaatcaagacgggaaaatagggaataaagtgccgtttttatcttcattatccccgataaatagggaaaataagggaaagaatacccttttataccaattatggcgggaaagtagggataaaaatatcgctttatcacatttgtcacaggaaaataaggggcaaaggggaaaaacttccttttatccgctccattagtagggataatatcaattactatagaacccgcacatctttgggttgaattgatgtaacaataaatcatagaacgataaaatgaataaacgacattatgaacatacgttacccaatatacgagggagtttatcgaatacttacgtaccactaccggaacattcatcaatgcgggctattataaagtgctgctttcggcggaagatatgaatggattggcgtttgacgcattggagattcagtaaatcagagtacaaaatacatcttcgttcgtctatcctaatattaatagcataacgaatgaagatatatactttactctttggtctattgctccccatccagccgtcagcgcaaactgtgcatgactgggagaatcaccatgtacttcaaatcaactgcgaaccggtgcgggccgcatttactcctttccacgtacagaagggagattgttccatctgtctggatggaacatggaagtttcgctggacacctgtgcccgatgaaagaattgtagagttctatcaaacggatttcaatgataaagactgggtcggttttcccgtacctgccaattgggaagtaaacggatatggtacgccgatatacgtttcggcaggctatccgtttaagatagatccaccccgggtgatgggtgaaccgaaggttgactatacgacttacaaagaacggaatcccgtaggacaatatcgccgttcgtttcagttgcctgccggttgggaagcaagaggccagacctttcttcgtttcgaaggagtgatgagtgctttctatgtctggataaatggagaacgggtagggtatagccagggaagtatggaaccgagtgaattcaatattacaaactacctgcatgccggagagaatcaaatcgcactggaggtttaccggtatagtgacggctcttatcttgaagatcaggacttctggcgttttggtggtatccaccgcagcatccatttgctgcacacacccgatatccgtatccgtgattatgcagtgcggactcttccggtttctacggactatcaggatttcatcttgcagatagatcctcaattcagcgtttaccgagggatgaccggaaaaggaactaccctgcagggagtattgaaagatgcttccggacgagaaatcgcgacactgaaaggggatgtggaagatatactcgacctggaacataaagcgggcaggatgaacgaatggtatcctcaacgtggtccccgtaaattgggacgtatgtcggcaacgataaaatctccgaaaaggtggactgctgaaaccccttatttgtataaactacacctggctctgctgactgccgaaggtgaagtaatacagcaggtagaacaatctgtcggtttccgttcagtggaaatacgaaacggacaactgctggttaatggcgcatcggttcgtttccgtggggtgaaccgccatgaacacgatccccgtacggctcgtgtcatgagcgaagaacgtatgttgcaggatattcttctgatgaagcaagccaatattaatgcggtgcgaaccagtcattatcccaatgtcagccgctggtatgagctttgtgacagtctggggctttatgtaatggatgaggctgacattgaggagcatggtttgcgcggaaccttagccagcactcccgattggcatgccgcatttctggaccgtgccgtgcggatggcagaacgggataaaaatcatccaagcattgtaatgtggagtatgggtaatgagagtggttatggtccgaattttgccgctatttcagcttggctgcatgacttcgatccgacacgtcccgtgcattatgaaggcgcacagggagccggcggtgaacccgatccgaagacggtagatgtaatcagccgtttctatacccgggtaaaacaggagtatctgaatcccggcattgccgagggagaggataaggaacgtgcggaaaatgcacgttgggagcggctgttggaaattgcggaacgtaccaatgacaaccgtcccgtgatgacgagtgaatacgctcactccatgggaaatgctctggggaatttcaaggaatattgggacgagatatacagtaatccccgtatgctgggcggatttatctgggattgggtagatcagggtatctacaagacgttacccgatggacgtatcatggtagcttacggtggtgattttggtgataaaccgaatctgaaggctttttgcttcaatggcctgttgatgagtgaccgcgaaacaactcctaaatattgggaggtgaagaaagtatactcacccgtggagttgagagttgagagtggagagctgagagtgacgaataggaatcatcatacggatttgtcccaatatcgctgtttgtggacgttgtccatagatgggaagcagaaggatcaaggagaaataacattgcccgaggtagctcccggagaaagtgaaacgatctctttacctgtttccatagccggcaagaaagcttcggcaaaggctacttctgacctgcgtctcacgataagcttcatcttgaagcgggatgctctttgggcgaaagccgggcatgaagtggcatgggaacagttctgcattcaggaaggcgcattattgtcttccaaacttgagaatagagggagactgaaggtaagggcagatgaagaacatttatccatcagtgggagcggcttttctattcaatgggagaaaaacgcaaccgggagcctgacttcccttacttatcatggaaaagaaatgctggctcatccggctgattttcctcttcagcctgtaacgcaggccttccgtgcaccgacagataatgataagagttttggcaactggttggctaaagactggagcttgcatcaaatggataatcctcgtatcagtctggactcttttaagcatgaagtccgtgaggacggagcggtcattgtccgtgttcaaaccaggaatcgctataaagaaggtatgattgtgacaaagtttctttatactatcctttccgatggaaccatagacttgaaaactactttccaaccgcagggaattctgcccgaattaccccgtttgggaatagcattctgcctttcatccgattataatacttttatctggcaggggcgtggtccgcaggataattatcctgaccgcaagacttccgctgctgttggactttggaaaggatcggttgccgaccagtatgtgcattatccccgtccgcaagatagtggaaataaggaagaagtgtgtcgccttatgctgaccgacaggcatggcaaaggtattcgtgtcgatgctgtggaagatgtcttttctgcttctgccctgcactataccgcacaggatttatataaagaaacgcatgactgtaatctgaaaccccgccccgaggttatcctgagcctggatgccgccgtacttggattgggtaacagcagttgcggaccgggcgtactgaagaagtatgccattgataagaaggaacataccttgcatatacggatttgtaatgagaaataggagccggcatagtgctggagcaagatttcccttcggcatactatttttataggcattactatctcaattgaaggtgtgtcaaaactggaaagtaacttaagtactcctcctcccaggaggaggagaattaagatagtctggttagcacgccgaagggaaaacctgcttcagtaccgccccggtatcagtaactaagaataactaacacaataatgaaagtaacaatgagaaacgtaaccactttattatcaaccctggcattagccaccaccctgactgcccagacacttccgcagacagagcggcaatacctctccggccacggatgcgacgacacagtagaatgggactttttctgtaccgacggacgtaactccggtcgatggacgaaaataggcgtcccgtcttgctgggagttgcagggttttggtacctatcagtatggaattagtttttatggtaaagcctttcccgaaggcattgccggtgagaaaggaatgtataaatatgagtttgaagttcccgaggaatttcgtggcaagcaggtcagccttgtgttcgaagcatccatgaccgatacggaagttaaggttaacggacgtaaggcaggatcgaaacaccagggagccttctatcgcttttcatataatgtcacggatttactgaaatatggcaagaagaatcagctggaagtaacagtttccaaagagagtgagaatgccagtgtgaaccttgccgaacggcgcgccgattattggaactttggcggtatcttccgcccggtatttctggaagtaaagcctgccgtcaatctccgtcatattgctattgatgcacaaatggacggatcattccgtgccaattgctacacgaatatctccggtgacggaatgagtatccgtgcacagattttggacggtaaagggaagaaactggcagataccaccgtacccctaaaagccggaagcgactggactactttacaattgaacgtttctgcccctgccttatggacggcagaaactccgaatctttataaagctcaattttcactgttggataaagaaggtaaagtcctgcatcatgagaccgagacattcggtttccgtactatcgaagttcgtgaaagtgacggattgtacgtgaacggggtgcgtatcaacgtgcgtggtgtcaaccgtcatagtttccgtcccgaaagcggtcgtaccctaagtaaagcaaagaatattgaagatgtacttctgatgaagggcatgaatatgaattctgtccgtctgagccactatccggcggacccggaatttctggaagcatgcgactctcttggactctatgttatggatgaactgggtggctggcatggcaagtacgacacccctacgggagtacgtctgattgaaggcatgatagaacgtgatgtgaaccatccgtccattatctggtggagcaatggtaatgaaaaaggctggaacattgaactggacggagaattccataaatacgatccgcagaaacgcccggtcatccatccgcaaggtaacttctccggtttcgaaaccatgcactatcgttcgtatggagaaagtcagaactacatgcgtctgccggaaatctttatgcctactgaattcctgcatggtttgtacgacggaggtcatggtgccggcctgtatgattattgggaaatgatgcgtaaacatccgcgttgtatcggtggtttcctgtgggtattggcggatgaaggcgtgaagcgcgtggatatggacgggttcatagacaatcagggaaatttcggagctgacggaattgtaggccctcaccatgaaaaggaaggcagctattacactatcaagcagctatggagcccggtgcaggttatgaataccgctatcgaccggaatttcgacggtaaactctctgtggagaaccgttatgattatctgaacctgaacacctgtcgttttatctggcagcaagtgaagttcccgtcggtaacggatgcttccaatacaactacacggattctgaaacaaggtgaagtgcaaggaagcgatgtagcagcccatggagtgggagtggtggatatcaagacttctattcttcccgaagcggatgctcttttcctgacagttatagataaatatgggcatgaactttggcgctggactttccccgtagataaactgaatcgggaaacagaacagttttctgcatcatccggccgtgcatcctatacagaaacagaaaaaggtattacggtaaaagcaaacgggcgtacttttgtcttttcaaagaaagacgggcagctgaaagatgtatccgtcaataaccgtaagattagttttgctaacggtccccgttttatcggtgcacgtcgtgcagaccgttccctggatcagttctataatcatgatgacgagaaagccaaggcaaaggatcgtacttacagtgaatttaccgatgcggcagtcttcacgaaactggatgtgaaaaaagagggggggaatctgatcctcaccgctaattataaactgggtaatttagataaagcgcagtggacaattcatccggacggcatggctactcttgattatacctacaacttctccggtgtggtagacctgatgggtatttgctttgattaccctgaagaacaagtgctcagcaagcgttggttgggagcaggtccgtatcgtgtatggcagaatcgtattcatggcacgcagtatgatatctgggagaatgattataacgatcctattccgggtgagacattcacctatcctgaattcaagggatattttggcagtgtctcctggatgagtattcgcacgaaagagggaaccatcagcctgaggaatgaaacacctgattcctatatcggagtatatcaaccccgtgatggtcgtgaccggttactgtatacacttcccgaaagcggaatttctgttttgaatgtaattcctccggtgcgtaataaagtaaattccacggacttgtgcggtccttcttcacaaccaaaatgggtggatggcccgcaaacgggacgtcttgttctccggtttgaataagactttgtaattccggttcaggcggaaagagatcagctctttgtcctgaaccggtaagtaatatcattcatttctccttgtacaatcttgtaaagccgctggttggtttgttcagacttcaagccaccgcggctttctacgtaaggcccaagttttatgtattggaagttccgtatagggaatccgtcaggcagttcctgcttaccggaataccaacccactttaaccggggcaatctgctgttgctgtagaaaattggcaaaatacgctacatcataaggatctgcatctccacccataaaacagacgcatgtaacagcctttccatacttttgtaaaagtacggaaaggttttcttctgtcagtgcttctccgacattttgttgcagatagggactatggcaacctttacacctgttcggacagttcgaaaggttgattgccaatgtcacctcatccggtatctcctgaaaaacaatgtcgtaatcagtgtacttcagcataatatcttcgggcagcctccttttgccgggcttgagagaaattgctgattcgtttcatgtagccgataacgcgggtcagataatccacgttctggctatgacattccggacactctttcaagtatcttttgtcaatgtggttgcattcgttgcagaccgtgttaggtatattgaaagtaaagtaattgcagccctcagtggcggctacccgaagtaattgcctgtattgctctttgcttaagtgctcttccagattcatgtggagtgccgaaccacccgtcagatgctctatatacctgtgtccatgcatacggaacttatcgatgacgttcagcgactcatcctctacgatgtagaaatagctgttatagcactcgcggaatgtctggaaaccggcttctttgtcccatttggcatgtttcacgcctacattctcggccggtatcatttcgcagttaaagagtatatctttcgttcgatatttcttattgtatttttcaactattcccagaatttcctgcacaaaagcttcatatttaggattatcgttgatttcaattcccatgaattgagcggcttccaccagcccgtttacaccgattgtcagatattggcgtcccatattgatgtatccggcatcgaacaaaggcaacattcctttgctttgcagatgctttaagttttcgttataggccagttgtaccttgtgtaccagatctactacctcttcaaggaagaaatgataaagcaatccggatttcactgcatgctggatgcaacggttcaggttgatagtcaacacactttttgatccggtagatacgccgcctgcacccagggtgtaactaaatccgttatcctgtatttcattacgtaagcggcaacagctacttaacgagtcggcattatcactcatatatgtaaagaaagagtgtccttccgcatacatttcggccgtgaagtcaccgtattccttatccaatacatctccgtctttggtcagtaaagccattgtctctacggggaaagtaagaacggctttggtgcgttccttattgaaccacttcatgaaacgcttctgcaaccagctcaatgattcccaatggggagcgtttccgtccgggaagacgaaatgttcgaaaaggctattgaaataatattgatcatagtaagctacattccagaatactgcctgaaaattccgtgcccccgtaggctgattgatggaatatacgatctgttcaaaacaatcggtgattattttatctatggtcctttgtttggaggaaaggtcggcaagttgttccggatgtttatagtaatcctctccgtattctttttctatgaaataattcatatacatcagaaattccggtgtggcgcaggcgccgctgagcatactcgatacgataaataccatattgatgaatcctccgcagaaagacttcagattggtgggtgccgtggagttaccgcctacggatgcggttccgctgatcagccacggatacatggtgatgcttgcgcaataattggcaagattggtttcatcattcttatatatgaagtgttggttcagcaattcgatgtagcggtctgaaagttccttgccgtacatgtccttcagacggtcagtcagcaaacggcggttcagacggatgaagttcgatttggggagctcgcctatcagtgtggctatatttttattttccacattggcgttagcgtcatacttgctaccggtggcagggttggaggcatcgcagtaatccatcaggaaacggagcttgtcacgtacttcccggtcttccagatgtttctgtctgtatagcatgaacgcttttgctacactgtaatagtgttcagccatcagtgcaatttctacctggttctgtatatcttctacactggttccatcactgatgttcacgcggctgagtatgttggtgatcacatcttgtgtggcaaaactgccgacagataaaaatgctttactaattgcgttcttgatcttatcaagtgaaaacgcttcttttttcccatctcttttgacgatgaaagtctccgaattgatcatacctgtaatttaagatttaacaaataaatattctttgtttagttagctatactaaatcaaacgacaaaataaggagagtaagtaataaaatgaatcttggaggatgcattctatcgcttttcacccgaaagcctgaatgattacagatatcggcaggtcttctgacttatttccgttgtggcgccttcccggtctttgcaggaccagtggctaaagagtgccacaatcttttctccacatggtagggagatgaaacttacagctacggggatagtccctgattttcacaggattcccttttaattccgtttcacgcttgcggtgatttggaaaccgttatcgctgacaaagttagaaatattttttgttctaaaaagcatctccaatgataatttccactatctttgccccgaattggtttcggatgaacatttctgtcatttggattaaaagggaatcgggtgtaaatcccggacagtcccgctgctgtgaagctccataactttcttgataaatactttagccactggctgtgaattggaggccgggaaggaatcagaaagggagtcagtcagaagacctgccattcgttaaagtctgttgctactcgtgggattaggggaacagtacgaacgtataattgttttaatttaattaatgcgaaagggatgcctatgaaaaaggtatgtccgcgttgtggtgcaacctttgagtgtatgcacgatcggattttgtcatgccattgcgctacggtacgactgaatgagcagcaacgtgcttatttacaaaagagttacccgggctgtttatgtcatgactgtctgacggcagtcaaagagggtatcgttatggatgtatgtgatgcacccctttgtgataaacagaagaacaatgataaaaaaagtattgattgccaatagaggcgagattgctgtacgtgtaatgcgttcctgcaaagagatgggaatacgtacagtagctgtctattcggaagcggaccgtgcagcaaaacacgtcatgtatgccgatgaagcctgtctgataggtccggcagcttccagagacagttatttgaatatagagaatataattcgtgctgcccggcagcatgaagcggatgccatccatcccggatatggtttcttatctgaaaatgccgactttgcccgtcgttgcaaagaagaaggcattatttttatcgggccctctgccgaaacaatggaagcgatgggcgataaaatctcagcccgtaaacacatgattgcagccggagtaccggtagttcccggtacggaacaacccttgcagagtgccggggaggctgtgatgatatgtaataagatcggctatcccgtgatgctgaaagcctctatgggtggtggcggaaaaggtatgcgactgatacatagtgaggatgaagtagttgaggcttataataccgcccgttcggagtctatgtctgcttttggtgacgatacggtatatctggagaaatttgtggaggaaccccatcatattgaatttcaggtattgggtgataatcatggcaatgtgattcatttatttgatcgcgaatgttctgttcagcgtagaaatcaaaagattgtggaggaaagtccgtctcccttcctcactccggaattacgcagagagatgggagagaaggctgtagctgccgccaaagcagtgaactattcgggtgcaggtactatcgaatttctggtggataagcaccgtcatttctattttctggaaatgaacacccgtttgcaagtggaacatcccattaccgaagaagtggtgggtgtggacttggtgaaagaacagatcatgattgcagccggttatccgttgcatctaaaacaggaagatttgtttcagcggggacatgctatcgaatgtcgtatctgtgcggaagatacggagaataatttcatgccgtctccgggaatcattaagttattggctgaaccgaacggtatcggtgtccgaatcgatagctatgtttacgaagggtatgagattcctatttattatgatcccatgatcggaaaactgatcgtatgggccaccaatcggcagtatgccattgagcgtatgcgccgtgtgctgtatgagtataaaattaccggattgaagacgaatcttacttatctgaagcgcatcatgcacaaccccgatttcgtaaagggagaatacaacacgctgtttatcgagaaaaactcgcgtatgttgcagcgtcctaacagtaataatgaagaaattgagaatattgccatgattgccgcttatatagattacctgatgaacctggaagagaattcttccacgcagtcgtctgatggtcgtcctatcagtcgctggcgtgagttcggtttgcaaaaaggagttttacgtatttaaagagggaggaagtagttaatggaaatacatattggaaaccgcgttgccgacgtgacgttggtcagtaaagaagataataaagtccggttgaatgttgatggaagaatctacgatgtggatattgccatggcagaaaacggcagctgctccatcttacacgacggaaattcttacaatacggaagtcatccgcggtgaaggaggaaaaagctatgatgtgaatttgttctatcgctcttatcatgtggatatagcagatacccaggtgaaatacttgcgtatgcgaaaaggaggagaagagagacaggacgataagattattgctccgatgccgggtaaggttatgaagattcctgtaaagaaaggggaccgtttgtcggcgggagatattgtagtggtgcttgaagctatgaaaatgcaaagcaactataaggtcaattcggactgtgtagtgagagaaatcttggtggcggaaggtgattcagtgagcagtaaccagattttaatgacattggatattataaatgaagaataagtatggaaaggacagaaatatataatcagtttgaagaacttaataagcgtgcctcgcagggtggaggcattgataagatagaaaaacaacatgctgccgggcggatgaccgcacgcgaacgcatagaagccttgctggataaagggacattcaatgagttggacaagtttataaatcaccgttgcaccaatttcggaatggagaaaaaacaaattccaggtgatggcatggtgaccggttacggcaagattgacggtcgtctggtatttgtgtacgcctatgactttacggtgcatggtggttctttgagtgaaactaatgcagcgaaaatagtgaaagtacagcaattggcactcaaaaatggtgctccggttattgctctgaatgactcgggaggtgcccgtattcaggaaggtgtcggcagtttgtcaggatatgcttctattttctatcagaatacgattgcttccggggtgatccctcaaatctcggctattctgggtccatgtgccggcggtgcctgttattcacctgcattgacggattttatttttatggtgaaagagaaaagccatatgttcatcacagggccggatgtagtgaaaacggttacgcatgaagaagtggacaaggaagagctgggtggagcctatgcacatagtagtaagagtggcgttactcacttcatgtgtaacactgaagaagaaaccatgctggccatacgcgaattgctcagcttcctgccttccaataatatggaggatgctccgcttattccttgtacggatgatgtcagacgtcaggcagaagagcttcaaactgtgattccggaagacccgaacattccttatgacattaaggatattatagagcctgttatggataaccaatatttctttgaagtgatgcctcattttgcaaagaatattgtggtgggtttcgcccgtctgaatggtcgttcggtaggagttgtagccaatcagccggcttatctggctggtgtgctggatatagatgcttccgataaggctgcacgtttcatccgtttttgcgactgcttcaacattccgttgattaccttcgaagatgtaccgggtttcctgcctggcgtgacgcaggagcataatggcatcattcgtcacggggcaaaaatcgtctatgcttatgcagaagctactgtccctaaaattaccctgataacccgtaaggcttatggcggtgcgtacatcgtgatgtccagcaaacagacaggggcagacatcaatctggcctatccgcaggctgaaatagctgtgatgggagccgaaggtgctgtgaatatattatatagaaatgttacaccggaagaaaaatctggtctgatccaggaatatgaatttaagttttctaatccgtatcgggctgccgagcgtggttttattgatgagattatcatgcctcgtgatacccggtataagctgattcaggcgttagaaatgacgcataacaagagtcagagcaacccacctaaaaagcacggcaatatgccactatgatttagttatgtttcaatgtgtgcgtctccccgtagaagtgatttctccggggagactttaaacggattatatgaagaaaaaattatatatgctttaaattatggaactattgaagaacctttttgaaggataccctgatctttgggatggaggagtggctcattccgtactgatcctttcacttgtgatagcatttggcattatgctggctaaaatcaaagtggcgggagtttcattaggtatcacatggatactttttgttgggattgtattcgggcattttgatatgactctgaatgaacacttgcttcattttatgaaagagttcggtctgatcttgtttgtttactccatagggctacaagtgggacccggtttcttttctgctttcaaaaaaggcggacttaccttgaatctgttggctatgctggtcgtttttctgggagtagtcatcacgattatattacattttgtcacgggtacgcctatcactactatggtcggtatcctttccggtgcggtaacaaatactccgggacttggagctgcccagcaggcaaacagtgatttgaacggaatagatgcccctgagatagcattgggatatgcggttgcttatccactgggtgtagtcggtattattttgtcattgatagccttgaaatatattttgcgtatcaataccaagacagaagaggcggaagcagaacgtggactcggacacatacaggaactcacagtgcgtcctatttcgtttgaaatccgtaatgaggctatcgacggaaaaaagataaaagatatacgtccgctgatgaaccgtgattttgtgatttcgcgtgtacggtatcatgacgggcaagaaacggaattggcaaattcagatacggtattacatctgaatgataaaattttggttatctctacccctaaagatattgaagctattagcgtcttcttcggtaagcagatcgatatgcaatgggagcaattggataagaaactgatttcccgtcgtatcttgataacgaaacctgaactgaatggaaagatgctttcccaattgaagatacgtaataatttcggagccagtattacccgggtgaatcgttcgggagtagacttggttgctgctccgcaattacaattgcagatgggcgaccgtgttactattgttggtagcgagctggcggtcagtcatgcggaaaaagtattgggaaattcaatgaaacgcttggatcatcctaatctgatacctatattcttggggatagcgttaggatgtatcctgggtagtacaccttttgtatttccgggtattccccagccggtaaagttaggattggcgggtggacctcttattgtttccattctgatcagtcgcttcggccctcagtacaaaatgattacttatactaccatgagtgccaatctgatgctgcgtgagataggaatttcccttttcctggcttgtgtgggattgggtgccggtaaaggatttgtggaaacggtgatttatgacggtggctatgtctgggtaggttatggtgttatcataactattgttcctttgctgatagccgggcttgtcggacgatacgtctttaaattaaactattatacgttgatcggagtattgggtggctcaaccacgaatccgcccgcgttggcgtattccaatgatctgacttcgtgtgatgctcctgcggtgggatatgccactgtttatccgcttaccatgtttttacgtgtgcttactgcacaaatactgatacttgcattagcttaattcctaaactttaattgaatcaaacattttctcttttagcttgttgtttactccccgtaagattatctttgcggggagtttttttatgtgaaagaaaaaatgtagtaaccaagatgtatacaaataaagtaaagagaatagctgccgttcatgacttgtctggttttgggcgtgtatcccttacggttgtaattccgattttgtcttccatgggctttcaggtttgccctttacctacggctgtgctctccagtcatacgcaatatccggagttttctattcttgacctgacggatgaaatgcctcgaattattgccgaatggaaaaagctggatgtacagtttgatgctttctatacaggatatctcggagctccgcgtcaggtacagattgtttcggattttattgatgacttccgccagccggacagcttggtggtagttgaccccgtattgggagataatggacggctatacacaaactttgacgaatcaatgattcgcgaaatgcgtcacctggcaacgaaggcggatgtgatcaccccaaatctcactgaacttttttatctgatggacaagccttataaagcagataatacggatgaagaattgaaatcttaccttcgtcttttgtctgatgcaggccctcaggtggttattataaccagcgttcctgttcatgaagagagtcacaaaacctcggtatatgcttataatcgggtaggggatcgatactggaaaattacttgtccgtatttgccggcccattatccgggaaccggggatacttttacaagtgtcataaccggtgctttattgcaaggggacagtcttcctattgctttggaccgtgccacgcaattcattcttcagggcattcgcgctacttttgggtatgagtacgacaatcgggagggtattttactggaaaaagtactgcacaatctggatatgcctatccaaagcgccagctacgaattgatttaaaatgtagttatgttactcgttggcggaatttatttctttttttggggttatgaattaattcaccacagattacacagattgacacagattctattttactgattattagattaataaatctgtgtgaatctgtgttatctgtggtgagtcttattcattccttttccgaaatgaataaattccgccaacaggtttatgttatttgtttggaagtgacgcttttaataagataggtacttctgccggttcatttgccacttgtattccagctgccgtcagtgctgcaatcttttcctcggcagagccggaattaccggaaataatggcacctgcatgtcccatttgctttcccggaggtgcagattgtccggcaataaaagctacgacaggttttgttacgtgcttctttatatattcagccgccagttcttctgcgtttccaccaatctcaccgatcatgacgatggattccgtatccttatcattttggaacatttccaatagttcacggaagtaaagtcctactacgggatcacctcccatgccaatagcggtagattggcccatgccgttggctgtaagatggtaaacaatctcgtaagtcaatgttccgctacggctgatcactccgacatttccctttttaaaaacgttgccgggtaagattccggccaggctcttttccggagaaattaaaccggggcagttcggcccgatcagcatggctcctttcagttgagtgaagcgatacgctttgattacatcgagggtagggataccttcggagatacagataatcagtttgattccggcatctgcggcttccatgatagcatctgccgcatagctggcgggaacaaaaagaatggaggcattggcctgcgtcttttccactgcctcgtacatggtgttgaaaacgggaagcccgtctacggtgctgcctccttttccgggagacgtaccacctaccacattcgtaccgtattctttcatttttacggcatgaaaatgtccgtctctgcccgtaataccttgtaccaacaggcgggtcgatttatcaataagtatgctcataatgtttctcctttcacagattttactaccatcagggtggcttcattcatggtttccgctacctgaaagcggttactgtcttttaatagtttcctgccgatattttcattggttcccgtcagtcttacaatgacaggaatttccgtttgcaattgatcgaaagcctgtatcaatcctatagctacatcgtcgcaacgagtgataccgccaaatatattgatgaagaccgcttttactttcgaatcattcagcagtatcttcatggcttcaatcaccttcacggggtttgaactcccaccgatatccaggaaattggcaggtgaaccgccatataacttaatcatgtccatggtagtcattgccagtccggcgccgtttaccatgcaaccgatgtctccgtccatacgtacatagctgaatcctctttctttggctgtagcttcgagttgttcctccggtgtaggttcgaaaagagcatgtatatcggggtggcggtagagagcgttatcatcgaacaccattttggcatcgatagccaaaagggtacctttagccgtcaacactaacgggttgatttcagcaagcgatgcatcgttttccatgaaggctttatagagatcctgaaggatggaagtcatacgcctggcttgttccgcctggtcaaagagcatgaatgcaaaactctgtgccagatattggggcaatcctatcaacgggtcgatattatagcgaatgattttctccggagtgttgcgggctacttcttcaatatccattcctcctgccgcgctcatgataagcactactgaacgcgtgttgcggtcaatggtaaaactgacataatattcagctgcgatatctacagcttcgctgattaaaattcgggttacaggaaaacctttgatggtcattttcagaatttcccgggcgtgctgtcttaccagttcttcactgtcagccagttttacgcctcctgcctttcctcgtccaccggtcaacacttgtgctttcacaactactttgtccacttctaactgccggaaagcttttacggcttcatcgggcgtattgcataacacatgtcgttctaccggaattccatactgggagaagatttcctttgcttgatattcatgtactttcatggatcatggattatagattagtatatgtctctaacaaataagatggctaaaaagttgtcaaataagtgattaagaacgaaaataagaaaaaggatcgtttctggtgaatgctttttgttataagaaaaatatggtaatagcgataaaaaatgacgtgtattatgaaaaaaacttgttttatactgtgaacttttctgcctttttggttaattttgcatattaatctcatattttaatattaaaccgttgggattccttgtcagattcggagtcaggaacccttggatgataacacacgaactgtgatgaacaggagaagattttatcaacagagaaaaacctccatgctgtttgccatactcgtattttttactcaggtatgtgtagcccaggcatataaatatataagtatggaggatggtctgggcagtcagaaagtttatcgtatcctacaagattctttaggatatatgtggttccttactcaggaaggtccggaccgttacaatggcaaggaaatcaaacactatgaattgacggataagggacagaagctcaatatgcagtttagcctgaattggctttacatggctgacgacggtgtgttgtggggaactggacggaaaggccgcattttccgctatgagcagggacgggatcggttcgaacaggtgtatatgcctcctttaccggaaaagggaatctcttcgccgaatattacatatagctatatggatcattccggacgtatctggctttgcagtaaggaacaaatggcattgttcgatacccgcacaggaaagatatcgcaattatcatccagtataatcagtaatgtcacttctattgcccagatagatagggaaaacttcttcataggtacggagtccgggttgtatcgggcggtattggatgagtctcgtacgttactttcgtgtacaccggcatataatcttcatgcaccggtgagcgaattattcttttcagctgctttgaagaaattgtttgtcggtacttttaagcagggagtgtggatttgtgatctcaatacttctctggaaaaccggtcggatgagacccttagtgacgtgaatatcaaacgtattatcccctttggggaaagggaaattctgatagctactgacgggaaaggaatttatcgtatgaatattgatacatgtcatgcaatcccttatattgtagcagattacagtatccataatggaatgaatggtaacaatataaacgatgtctatgtagaccacgatggtcgcatctggattgctaattatcccagtggaataaccatccgcgacaatcgttacagcggttaccgttggactcgtcattcggttggaaaccgtcagtcacttgtcaataaccaggtacatgatgtcattgaagatagtgacggtgacctttggttcggtaccagcaatggcataagtctatatagttccgctacgggggaatggcattcctttttcagcacttttgatcatgaactggaagataagaatcatatattcctgacgctttgtgaaatctcgcccggaattattctggcaggtggttttacctccggtctttaccagatagataaacgtgcccttacggttgactatatcgcttcttctcttttctttcatttagacctgcgtcccgatcagtacattcgtgacataaggaaagattcggaaggtaatatctggtcaggcggtttttacaatctgaaatgttttgatcttaaaagtggcaaatcccgcctgtattccggcttgaattctattacctgcattcgcgaaaaagacgattcttcgatgtggattggcacttcggcaggactatatttgctagacaaattttccggaaaatatcgcagcatcgatatgcctgtggaatctatgcatatccatgccttgtatcagggagacgatggagtgttgtatataggtaccagtggttccggactggtgctttacaatcccgaagaagaggctttcgctcagtattatacagataattgtgcccttatatccaacaatatctatacaattcttcctaaaccggacggggatttattgcttagtacggaaaatggaattgttcatttttcacctcgtagaatgtcatttaataactggacgcgtgaacaggggcttatgagtgtctgtttcaatcccggtgccggtattttgcatagtagcgggcgtttcattttgggaagtaatgatggtgtcatcggtttcccctcggatatgcgcattccggtcccaactttttctccgatgttgcttagtgatctaaacatatcctatcagactgtatatcccggtgatgaagaatcgcccttggaaacggatattaacgatacgaaagttttgaaacttaaatatgaacagaacactttctcactgagggcttcctccattaattatgactatccttctaatattttatactcttggagattggagggcttttatgatgaatggactacaccttcttccaacggcctgatgcgtttcaccaatattccttcgggtaaatatatgcttcatgtacgttctgtatctaacgaagaaaagtataagagttatgaacagcgcagtatgttgattatcatatctcctccgttgtgggctactccgtgggctatagccggttatattatgttggctgttctggtgtgcgtgattctgttccgcatcattacactgaggaaacagaagaggatttcggaagagaagacacgcttttttataaatacagctcacgacatccgtacacctttgactctgataaaggccccgttggaagaactacggaacaaagatatggtgaatgaggaaggtaagggccatgtgagcatggctctgagaaatgtggatgttcttttacggcttataacaaatcttattaattttgaacgtatcaatacctattcgtcacatatgtatattgctgagtatgaattaggtacgtatatatcaggcatttgtgacacatttcatgcgtatgcaaacatcaagcatatcaggttgacttacgatagtaatttccaatacctgaatgtgtggtttgacagggataagatggattctatcatgaagaatatcctgtcgaacgccatgaaatatacaccggaaaatgggaacatatatgtcagtgcatcagaatatgaggatggttggggcattgaggtgaaagataccggaatcggtattccccgcaatgaacagaaaggactttttcatacctattttcgaggtagcaatgccgtcaacttgagggttagcggtagtggaatcggcctggcattggtgcataggctggtgcgtttacatggtggaaaaataactatagagagtacggcggaacaaggtacactggtaagaatcatttttcctaaggggaacaaacattttcgtaaagccagtatcatatctgcaactccggagcgatctattagcatgcaggaagttgttattccggcactttctgccgttgagcccaagcagagtgatgcttcttcccgacgtatcctcatcgtggaggataatgacgatttgcgtatttatctggtgaatacgcttggtgaggattatctggtgcagtcctgtcacaacggaaaggaggctcttgaaatcctatccgaatttaagccggatcttgtgttgtcagatattatgatgccggaaatgtcgggagatgaattgtgtgccgccattaagggtaatattgaaacatctcatattccggtgcttctgttgactgcattgggtgatgagaaaaacatgctggaaggactgaagataggtgcggatgattacatggcgaaacctttcagcatcagcatattgaaggcgagtatcaaccgtttgattaccaatcggatcttattgcataagaagtatggcagttcggactttgaaactgaaaaatggccgaaagggtgtcgggatacacttgactggaaattcatagcttccgtcagggaaaatgtggagaagaacatggccgatccggattttacggtagatatgctttgttcgcttcaccacatgagccgcagtagtttctataataaagtgaaagcattgactgattgttctccggcagattatgtacgtctcatccgtatgcagtatgctgcccgaatgttgaaagaaggcgaacactctattacggaaatagcggatatgaccgggttctgcgatgcaaaatatttcagagaggtattccggaagcatttcggggtcagtccgagcgagtataggggaaaagggacggcagaaaaagaaaattcagatttaaagcaagataatgatgggagtatgtcaaaatgaagtttagaatgcaaattacatgaattacacaaatgattctttttttatccttctgataatcagaacttatctgacttgttgtttgcgtaattcatgtaatttgcgttcttttattctgttttggcacattctcttatattgctgcaatgttttgtttgattgtactatggagtttttctttcaagatgtgcacgtcgaccggtttaggtacatagccgttgaatccgttctccagaaccttttctttatcagaagagaaggaatatgccgtaactgcaatgataggtatcgtttttgagaatttccgtatctctctcgctgcttcgtaaccatccattttgggcatattgatatccatgatgatgacatgcggctgaaattttcgatataattctatggcttcttcaccattccaggcatgtatcagattgtactctttattaagaatagaatcgaataacaggtagttgttttcattgtcttctgctattaggatgacaggcttttgctggggtactgttgtggtaggattaacagcttcgtgccgcttattctgttgtgtagcaatttccggtttatacggtattgtgaaccagaatgtgcttcctttgtctttaccctcagattcaactccgattcttcctttcatcttttcgataatgtttttgcagatggaaaggcccagtcctgttccttgggtgaaagtatccactttggtgaaacgctcgaatattttattctgatcttcctgtgagataccccggcccgtatcttttacataaaaatagagttcttctccacggatttcataaccaaatgtgatactacctgtcgaggtaaacttgctggcattgacaagtaagttgataagtacttgtgaaagtcggttacgttcggtttgtacatggcacttggtaactccgggaataaatttcaggacaacattcggttgtagtctgcgtcgtactgttctttctacatctcttgccagtccgttcaaatcaacgttctggtaattgaaatcaagagtatttgcctctattttcgacagatccagaatgtcgctgataagttgtaggagaagctggttgttattctctatgatactaatgaactcttcccgttcatgttcatcctcagtggtggtcagcaggctggagaaacctatgatggcattcaatggtgtgcgtatttcgtggctcatattagccaggaatgcagactttagccgctcggattccagagctttttctctagctgttaccagtgccttctcttgtctcttacgttctgtaattaatagtagcgaacctaccaatgatatcggattgccctgctcatcgtattgatctactaccgcattcgtttcaagccaatctgtaaattttcgtccttccacttcagtaatgatgcgaaactcttctttggcatgttgtaattttccggatacaagattcttgtgtatctgctgcatacgttccacatcttccgggtgcattttctgaaagtattcggaggcctttataatgtgcgcctggggagtggaccctttttctttagtgaaattcatgtgggcaagtatttgttctgattcgcaagtaatcatattgcttttcaggttccagcgccaaggaatgattcgagccacgctcaaggtcatttccagtttcttattgatttcccgcaatgcgttttccgcttcattgcgtgctgtgatgtcaactccgaagatatctatggtatgcttttcggacgactggcagataatgaattcataaaaggtgtgagtcggcttaaaatagtgggtaaaggtaatcgcttgtttttctttgaataccatttttataaatcggggaagacagtcaatctgtgaaagcgaattcttattcatatcattctcctcatttgctgtaaataaattattgaacaagctattgccggcttggtactttatatctattgcctctcccttttcatcgaaagctacttttgcctgggtatacgatatcggcatattgcacacaagtgtattatgggcactgaacaaggctattttctttcgctgaaacaagtatattataagtgcgatgaccacaagtgaaagcagcaggattgttccgctgataatccaccatctatatttttgccagaatgtgagcggtttattcaggaatattgtatttgacggacaaaggtctgcatcaaggccatccaatttcagttgtgcatagttgacgagcgggtatgactttttactatatacgaatgggatgtcacgtagcttttttccctggagcatttgcccgataatgtcagttaatgatttctctagttctgcttggtcatagaagtatccgccaatgaatcctgccttattgatatacgctcctcttaacgcaaataccggctgaggtgaagatgccactagctgaaaatcaccgctgatgagtgtaggcgatccaaacaggtttttacgttcatagaaccaggtagaaaataagatgcttgtggtcggatcatctgtcaataaatattcttgtagttgcttgctgttttcttctttacctaccaggcgttcgtattcgatattcggatattctgatgcgatgtacgagtgtatgagccggtccagtcgttgattctgataaagttcgtctgccgcaaatataattctcttcatttgaggcaacatccgtatcatcatgtcgatggtttctttatacatatccggggtttcaataaaggtgaagttatattgttctctgatgtcattcagaggtgctactttattatccgccatatttatagagcgtcctgtgaagtaatattcccggggggcataggtatcttcattggcaatcaatatcattggaatatctccccattctttctgaatgcgatctcttaaagtaaaagctatactgcctatgagcaccagataatccggcttattcttttcataacgctggaaaattccttcttccatttggttgtacaatgagtcatttcggataaatgtcccatttatatgtactaaatcggcactgacatcttctattgaagaagtttggagcataataggggttataagcgtttgactccatggggctccttcattataagagttaataataagtagtcgatgttgtttggggactacggttgcatgggcaatggataaacttaagtgtagtaagacaaaacagaggctgattatatgtttccaagataaaaaaagtctcataaccagattattaagtattcttttatattgaattaatattagatattaatacaaaaatacaaaagtaaggtttcttataattgctttttaactctatattaataaagattaactattgcgttctgttattgttgtgagttatggttttatcatgcaaaattatactaaccattctgagtttctgataggtcagttttattttgtagaaaataaggctgtttctgatgaagcagccttattcatttttgagggagatttatcttacccctttacacattcatggcattggcactcagtgctcctactatagccgaagctaccgcaatcacaattttgagaattttatcccagattgactttttcatattctttgattaaatgattagtggtattttaacccagcggattttcatccagtcctccctctccgctaccggatcctccctggtcaccggaagagttgccacctgacgaacttccgtccttgtttaccaatgcttccagatcgtagaagtcaattttctgtccggcacgtgttgccgtcacatccggtctgatggtggttgatggtcggaaattgattttcacggccttaatgttcttagccgtgcaatcctcctttttctccactccgacggtccgtgccgacaggctgaataccccgaaatccttgatgttcaccgattgcccgccatacagcttgtcaatcagcgcctctacaaagttggtaattacacttttgatatctcccaaggtgagtgaacttttctccttcatcacgtatgccacgtcttccaggtcggcattgtcccctaacgtcaccagttgcggataaaactttgccaccgcatcctcctttcgcggatctctccgcggaatctttttgaatggtactcccataatcaatcatttttttaaagttaaaaaacaaggttatttaatgatcctttggggaaagctgtccgaatcctcttctcatgcttttcttaatttactctgccatcatgggcttgccggaagattttcgctcttttcccctttggacattgcaaatataccccgttcttttcccttccactttccgcttgaagctatttgagtttgtatgaaaaaaagagagtgtaaatgagaggtaataccttctttattcctttctgttgtcgctgtaaatgagtacctttataccatgtaaatcactaaaaaacaaacttatgaaagaagaaaacttagatgaaaaagtccctgtccgcgcttataccaaagccgaccttgccatgctttacaatcccggtgtatgtattactaccgccctacagcttctccgccggtggatttatgctaacagacaactgatggcggaactgaaggaagcgggttataacaagaaccgccattcttatctgccccttgaagtgaaacttatattcaagtatctcggtgagccttagatagtttgaatccggcaaatgaaagatttgtactttttgtaaataaaatgccaatatatgtaacgggtgataagatatgatgtaatgctgtattacatatattcttatcacccgtttcgttatatgataactcacttcccgaatcccttgtttacctcatcattctgcaagtccaccacttcatattcggtgcttccctgcgcgttccttctcgtgcggaatctgtatttctccagcgacagtaccaatgtctgtatcgcctgcctgttcacctgtatctttccgtaaatggcaatcttgctgagtatggctgctgcgggcatccacttcacgcaggtgtcttcgggttccggtttccggaaatataccagcagattctcctccaccggatctttcatgcggtgcatttcgttgtgccggttcagttcgtctatctcttccccttcgtaccagtattgatatcccccgttcagcaacgcgtatgcctgcgcatatatcccttcgtaattgacgggtgtcctgtaatccatcgaaatgacagaagagggcagaaatcgtctgtttcctcctatatcctgtaggcacagccggttgttggtgctggcaatgaaggacgcgcgccgtatgaaggatagtgtctgcatgtcgtatacttttcgttccgtgacgctctcctgcgtgatggttcttttgagtcctgccaggtcactgattctggctccgtcaaactcttccatattgatgatgaggtgcgtgcttagcatcagctggtggtccttgttttccggattggccattccgttccggtaatattccctccactcaggtggcaacagtcttcgtatccatgtgctctttccctttccctgctccgagtagagtatgatgacgagatggttcaccgcctcgtcctgcaatgcgcacgccagcatgcccacgaaccactttctgaaacttttcttccagaactcctggtcttcggtctgtacggtttttgccagctgtccgatataatcggtcactccgtcccatggcttgagactttcgatgtagtccgtgaaaggattgaaatctcttgggtatgacgaatttacgattgtcttcagataatccggcgaacactttatttccgccagttgcaggtcgaggaatatggcgttgtagcttgttattcttacgggtcggaacttgcctatccatttttctgtatcctcattgaagttaaggtattccagtcggtccattataatgttcctccggaaatcataatgggttttcaggaaatcgagcagctgatggatcgtgtcgggcttcccctcttccttgcgcatgttggcttccgtcgtcctgtcggtatagatgtacgcgttgtgtatgggcgctgccgcgttgaactcttcactgccgaatttctcctgtgccaggcgcatgactacttcctcttccaggcctttcgtatagcatttgtttcccagtgcgaagatgaagcagtcccgttttcccggctcaaactttgatatcctcttcaccgccagcaccgccttgttgaattccatcctttcccagggttcggcttccgcctttccgccctccggcttatcactcaccactttatcactcactgtcttttcacttatcaccttaccacttatcactttttcacttaccgtttttttccttcctggtcgtggcttttcgggtggaatgatatccgccagtgtctcgtccacctctttcatgagttcttcattgaggtacgccttttcatcgaaagacgtgaagaatcctcttgatatgtccttcccgcttccgtcgacttccacatccagcagtttttcgtaatattccttgcaggtgtcatacattattcggtgatgcttctccaaggtggagaaatccatccccgttttggcaagactttctcttagagtcgtggcatacttcgtgcgcatgaatacgaatatcttgaatccgtgtgctttgggagtcaggaaagaagccagcgtgttgggatctccattgattttctccctcagtccttccagcttctcttcgggttggtcgtcaatgtccagcaggatgatatgtgtataccttgtaatgctgtatgcctgccttttctcccgatatcccgccgtaacggtatagaaaggcagctgttttttcacattattcgcctcttccatctttccctggctgacgagcagcctgattttgaatatcagttttgcatgtatccctttggtgatgttttcaataacttttcggagtgttatttctccccgtacattgctgaatccgctgtatgcggtaactggaatattttccatttgtttttagttgtttaaatctgccttattggcggcacgaaataggggataataatctgaatggcaaaaacgcctttttagtgagaaaaagcgtttttgcacaattttgaacgtttatttctttatttttacttgctcctccttttcctgaaattcttttctcagattaatgatttcagtattaatgcttttcagagctagaactcctttttcatgctttcctttttcaaagagtacgatgtgctccagtttctttgccagatccatcgttcctttgattcctgcttctttcttgtggtgcataagcatgtttatccatggagtgaggaattccttcctttcttcggccccgaccagaatccgttctccaaacgcttcattttcaactaacaggatattgatcctgtcttctttcttttcaatttcgatgttgtagccatccttgcagttgagttcaatactcaagattgtgtttttttagtcataaaatcacaattttagaagttagtaatttattttaagtttactgtacgaaagcaaaattaacggttctatctgtaatatctgtcattcttttctgtaaaagtgaatattttctgttctatgtgttatacacaaaatggtaaataggtatggagagctactacctattacttatagaatgtgtgtaacaaggtataaagaaaaagtaggaaaatacgcgcctatgggtgtgtatacgcgggtacattattataaaagaaactgtgggatgagagattgccgggacagaaatgcaagaataatgaaataggggataggataggagagtatggatatggtgttaataatgatcgtcgtaaatgatgggtgttttttaatcgttcgtttaatgtgcgcaaagataatgcccagaaatgaaacaacaaaatattctgataaagaaaaatgaaatattttctttttgcctatatatattactaatatatagtctgttacctttgaaatgagattgtaattttgagattactttcttgttgaaagaatcttagtatgaaaacaaccttccaacctgtcttttaaacgaacgattaaaagacaatatatctgtttaattaattagtttatagctctttacctgcgatgtgtcatggtaatgaacaactacgggaaatcaatgggcaagaagaacacaaaacttgccatatcttacataaagtgttcgcaagtgattgaaattcaagtgtatgcaagaatttcaaagccccgagagaacacccttttctgaaataacccttgaaatggaagcggacaaagagactgaaatatggtacgccatgcgtgccacgtaccgtagagagcctgatgctatgcgcttgcttgaaaatgaaaaaatggggtgttttattcccatgcaatacaagattagcataaagaaaggtaagaaagtccgtgctttggttccggttgtacacaacctgctttttgtccatgcccgtccttccgaggtgaaacgcatcaaatcacaggtaagctatttgcaatacattacggatacccgtagcggtcagaagattattatctccgacagtgaaatgcaacgctttattgctgtagccggtacttacaatgaccatctcatgtacttccaacctgatgagctgaatctgtctaaaggtaccaaagtccgtatcacgggtggtgacttcgagggtcaggaaggtctttttctgaaagtaaaaggcgcacgtgatcgtcgtgtggttatcgagatacaaggtgttattgctgttgcgcttgctactattcatccggatcttatagaagtaatcaaataattgacgatcagctgttgccattgaacagctgataaatgacaaattataaatcataaatcattatgtctctttctgaagaaacacttgctcttcagcgtgcagcgcacgatctgatgtatttgggcatggacggtagtcctgtctatagtgacgacctttcccgtcgcaacggtgaagtttaccgcctgactacggctttgtataattccggtatcaaaggttctacagtcgaagaacaggcgaacgtttgtcttgctcttctgatgggttatagtgcctcatttgtagatcacggtgaaaagcagaagcatatccaggaagtcttggatcgttgttgggatattcttgatgctcttcctacttcgttgctgaaacttcgtctgcttactgcctgctatggtgaagtgttcgatgagtctttggcagacgaaggtcgtgcgattatcgcttcttgggattccgtatcgcttacttctgatcagcaggaagctattactgagtttcagaatatggtagataatccttatccgtgggaatatatagacggataaaaatcttcattataatgtttaataataaatccgtattgattactggagaaactagttttttcagtaaagagtttgtggaagccattcttcgtgattacattttataatgaaccgtgagtattgttactgctgctatcccccctagtgcacagatgcatagctttattcttgtggtaggcaggtagccgtgatgaggttgttctctaaatagaattagtcgaattgaacttggaaaaagtctgaatattcgtattacatgatagtgtttacttataaaactaaaaattatggttgtaaatgaaaaacaaacagttataaagattgataatgggagttttgtgacttgtgaaggaaataaacattattatttgattcaaggagcacgacgtcacgaagttcctttaaaggttttggatgcattaattgacgataaaaaggtgattcgtattataaaaaaagacactttggaaaatattccattagggatatctctgtctgatgatacctgtttgataagaggttatgaaacagatccggtttacctttattcgaactatgtgaaaagtcatattcgttcttcaaatgattttaatcttacaggatttaagtgggaagcaataaagaatatttgtcaagaaagcgtaaacaaaattcgacctgtaagagattttattattgaaaagaataaagaagtttttattaatgatggtgatataccttcagactttacaaattatacagactatggaattcgagaagactttgtatacgaaggtgatggagaggtaatgaagcaatgctctattctgttacctgaggaaaaagaagataaaaagtatcctgtactatatttatatcatggactaggtgaaaatacagaatggcttgatttaagtaagggacgcattagaaagattataggatatatggtgtctaaaaaaatgataccagaaatggtagtggttattccgcaaataatgtctcctgactctacatgtgaggaaaaaaaagttcgcgatttttatgatttttttaagcatttgatacatttgatagactatataaatactacttattcaaatgttgtatcagtgaagaaagaggatagtgcaattgcaggtatttctcttggaggaacaacagctctttataatggctacttatttaaagagcgttttaaatttgttgctggaataagtcctaattatcaacttttgactagtaaagagaggaaaatatttaacggatggatagccaaacctgaggattttgttttgggaacagataatggaggttttgcttttattggtaatggtactgctgatacaggaacaggctcgcatccaagatattatagtaatgttctcaatgaaaatggtatcgataatctttttacgcttcttccaaatggaggtcataattgggaggcctttagaaaacttttttatatatttatgtcttatgattttttccgcaaacgagtggattagaaaaggtaatgttgttaataaatctgtcagatggcggaatcactgaaaaataaaacagttcgtggcgtaacttggagtttaatagataatatagctaattctggaattacttttttagtcgggcttattcttgcccgtttattgactcccgcagaatatggggtaatggcaatgatcgcgatttttattgccatatcaacttcaattattgacagtggtttctctaatgctctaattcggaagaatgaggtaaagaagattgattatgacaccgttttttatttcaatctggtagtaagtggtattttatatatatttctttatttactttctcctgctatcagttctttttttaaagaaccggtgttaatcgaagtaacaagagtaattagttggatactgattataaacgcattgggaataattcctcgaactatttttattataaatgtagattttaaggttcagacaaaagcttctttgatatcttctcttgtgagcggaattgttggcataagtatggctttgttcggattaggcgtttggagcttggttggtcaacagctttctcggcaattactgaatacatttttcctgtggttttattgtcgttggcgtccctgcttgggaattttcaattgagagtttcaaagaaatgttcggttttggctctaaattgttagtttcaggtttgatggatacaatttataaaaacatttattatatagtaattggacgtttttatgatccggatcaattagggcaatatacgcgggcggaacaatttaaattaatattttctagcaatttaactgctgtagttcaacgtgtcagttatccggttttgagttctatacaaagtgaacctgtacgattgagagaagcatatcgacgagtaataaaattaactatgatagtgacatttgcttgtatgttggggttagcggcaatagctaaacctttaataatcctgttgattggtgagaaatggttgcctgcggttccttttcttcagattatctgtttttctggtatgctttatccgttacatgctattaatttgaatattcttcaggtgaaggggcgctcagatttatatctgaaattagagattataaaaaagataatagcggttattactatttttatcgggattttttggggtattgaatgtatgctttggggaggagtttttgtttcatttatttctttttttttgaatagttactattcggcagatttgattgattattctaccaaaaatcagattagtgatatatttccttttttaattatttctttgattgtatctttttgtatttggttgatttcatttacggaatggtcatatataataattttgataattcaaattattgttggtatagggctatattggtttatctcagagaaactacctatacaagaatatcaagaggtgcgtcagttagtgttttctttatttaagaaaaaatagtactatggttattcgttctttactaacaattcaagaggctttacattctttggatgaaattcgtctttggattgagaatcgtaatcgttcaatccatgtctcaatctctcctgttcctttttcttccctggatcactggtctcaggatgaagatggtactttaagacatagttccggtcgttttttttcgattgaagggattcgtgtagagacagactatggctccctttccagttggacgcagcctataattaaccaaccggaagtaggctatctggggattctgaccaaggaatttaatggtgtcctttattttttgatgcaagcaaagatcgaacccgggaatgtaaattgcgtgcagatttctcctaccttgcaggctactaagagtaattatagtcagattcataaagggaaacaacccctgtaccttgattattttgtaaatgcaagccctgaccagataattcttgaccaacttcaatccgaacagggagcacggtttcttcgtaagagaaaccgtaatattataataaaagtggaggaggatgttgaggagcatgatgatttccgctggatgacgctcggtcagataaaagagttgatgcgttatgataatatggtcaatatggatacccgtaccgttctttccggtttaaaaatcagcgactatttatctcttgcagatgatacgagtcgtttgtctgtttttggtaaggacttgcttctttcttccgtaacgaatcactgtcattctacgatatccgagcatctttcctggttgtcttctttaaagtcccgttatgatttgaaggtacatccttttcctctccggaaaatgacagattggcgggtattggccggtgaaatatcccgtgaggatggaaaatactttaaagtggttggtgtgaaagttaccatatctaaccgtgaggtctcttcgtggtgccagccgttgattcagccgatgcagcaaggcatatgtgcttttatcatcaaaaagataaatggagtttatcattttatggtacaggcaaaacttgaatgcggtaactttgatgttatggaattggctcctacagtgcaatgtctgacaggtaatattccttcttcccgaagtgcccgtccgcctttccttgaccttgtgcttgagtcttccggatctcaggtgctttacgatactttacaatctgaagaaggggggcgcttctatcatgagcaaaaccgtaacatgcttgttgaggtggatgattcttttcctctcgaactccctgaacgttatcgctggatgactttaggacaaatctatcagttcttgcgtttcaataattatctgaacattcagtcccgcagtttgatagcggctctaaattatttatcttaaataccaaatgattaaaaagtataaagtgggtgtgcttggatgtgcccatattgcgatccgctcccttcttcccgccttttcatcatctgaacgctttgaactggctggcattgccagccgtgattttcacaaagcccaacttgcagctgccccttatcattgtgttgcttacggtagctatgaagagctgctggataatgaggatattgaattggtatatattccgcttccgacaggtttacactatgagtggatccataaagctttggaaaaaggaaagcatgtgatgagtgagaaatctctgtcgtgtacttatgatgaggttcgggagcttgttgaacttgcctgtgacaaacatttgcttctgatcgagaacttccagtttcgttttcattcccagcatgtttgggtaaaagaacttttggaaaggcatgaattgggtgatctccgttgtttccgctgttccttcggcttccccccttttgaggatcggaataatatccgctattcgaaatctcttggcggcgggtctttgcttgatgcgggagcttataccttgaaagctatgcagtttatacttcctgattgtagttttagtttgcgttccgcttctttataccaaccttctgatatggaggttgatttgtatggtggggcgtaccttgacagtcctcaaggtgtcattgcagagcttgctttcggttttgataattattatcagtgcggctatgaaatttggggcagtcttggtaaattgactaccacccgtgcgttcactgctcctgccggttttactccgaaagtaattttggaaaggcatggacgttgcgaagagattctcttacctgctgacgatcatttctcaaatatgctggcgcatattgctcacagtttggatacaggagagttctcgggtgaatatatacagaatttgaatcaatcccggtatatcgggcaaataaaagaatattgttatggcaaataaaagtatctatgtaacgatgcctactttggcaccgttggaagaagtgactcagcttatgcagggtatttgggagcgtggtattatgacgcataacggtccccttgtacaacgttttgagaaggaagttgctgattatcttcacttgcgtaatattgtttcagtgaccaatggtactattgccattcatatggctatccgtgccttgggtcttaaaggcgagatcattactactccttttactttcatcgctacaatcagctccattatttgggagggttgtacgcctgtctttgttgatattgatcctgagacattgaatatggacccgtctaagattgaggaaaagatcactgaacgtacttgtgcaattcttcccgtacatgttttcggtaatccctgcgaagtcgagcaaattgatgctatagctaagaagcataacttgagggtgatttatgatgctgcgcatgctgtgggggtgaattataaaggcaggtcaatatttgagtacggtgatatttccacaacgagctttcatgccactaagatgttgaatacggctgagggaggtgcctgctttgccttggacgatgaattgcatgaaaagttgaagcgtttgcgtttctttggttttgatgatcgtaaggatgttgtggatgatggtactaatggaaaaatgaccgaagttcatgcggctatcggcattgccaatttgcgttatctgccgtctgccctggctgatcgtcaagaaaagtatatgctgtataaagagatactttctcaatgtcctgaattgaagtttcagcgtatcaatgaggtttgtaactatagttattttccagtgatatttccttcggaagcaacgcttctctctgttgagaagaagttgaatgctgaaggcatttatccaagacgctatttctatccttcagtgaatacttttacacagatacttccttatgtagaaatgcctgtttccgaggatatttcgaaaagaatactttgcttgcctttgtactatggtttggcaaaggaggatattgaaagaattgctaatgaagtattatcgttatttttttagtgaggcagtgctctgtttgggtgtaatacatgaatgatatgaaacaggatctttttgcattttttttaagaatgtctttttggatgcgagatataatgaaaggtggttgtattttttctcattataaaaatattcggttgattcaagaacatcctgagcaagggaatattgagagaaagcgtttacttacagatattttgcggcatgctgttatgcatactaccttttacaaacatatcaatccgtcatctttgtctaattttccgattgtaactaaaacaatattaattgataattatgataatatacgagttgatccagtatatcttccttggcagaagggggcgtatcatattcaacgaacttccggttcgacaggaactccttttgctgtaccacaagatgtaaggaagcgcaatcgaaggcttgcagaattaaagtatttcggacgtttggctggtttcaagtcacatgataaattggtgcatctgagaatttggacaaaatggcaaaacaaaactaagaaacagtcttttaaagaaaacattgttccttatgacatctcaaatttaaatgaggataatcttcaggtactatatgacactctgaagagtacacgggctaaatgtgtacgaggatatgcttcttcttttgatttactagctaaatttgttgaaaagtatcatttagacaaacttcctcatttaaggatcgctattgctacgagtgagacattatatgattctacttgtgagttagtggaaaaatacattggatgtaagattatatctcaatacgcgaatgaagaaaacgggattcttgctcaacaacaagtcggagattcttctcgtcgcttctatttgaatgaagcttcctactttttggaagtgctgaaattcgacagtgacgaaccggcagaatatggtgaacttggcagaattgtaattacagacttttttaattatgcatttcctctgattagatatgacaatggcgatacttgcattatgcaattagatgagaaaacgaagcatccttacattgcacaattatatggtaggagattagatttagtgtataatactaaaaatgaacctgtttttccaatggtattggctagaatacttaaaaactattcagaaataagtcagtggcaatttattcaggaaacatcagattcatattgtctaaaaatagttctacgaaatttgtcaaagttgagttgctcggaagagatcgttattcagttaagagaatactttggtttagatgctaaaatttctatcgaatatgtacaagaaattccggtacagcgatccggaaaacgaaaatgtgtggtttgtaataaagagattaaatgaaagatatttatatattaggagtcgggtgtaatacggttgtgtatattgatttagttgaaagttgcgggtatcgagtagttgggctttatcattatgaggaaggacgaactggggagatttatttcggtcacaaaattatagggagtaatgaggaacttttttctttagacctatctggtaagcaatttgcaattagtgtcggcgataataaaatccgttcttcgctttataataaaattttatataaaggaggtgttgtccctactattattcatccttctgctatagtttctaaatatgctcagttaggtaatggaatcgttgttcacgcaaatagtgtagtttcacctgatgtgattatcggtgatgacagtatagtatcttccaatgatttaattactcatggaagtagaatgggaaagcattgctttgttgctagtaatgtagtattgggtgctaatgtacatatgtgtgattatgcttttgttggttctggtgcaaccataatttctagtaaagtatcttatattggcagaggagctattgttggtgctggagccgtagtaacaaaaaatgtggaagcagatgcttgtgtagctggcaatccggctcgatgcatagattgagataactatagataattacatgagatattaagaaatgatacgtgcggaattatgataggtaaaaatgagaactcgttaataaccatctctttatgtggtgacatttttataagcaaacgtttacctggttcgtcctatccgggttttgatgaattgtacacatttctccataaacatgaatgtcgatttgccaatctggaaactactattcataaaagagaaggatacccggaagcttttcctggaggtgggtatgcgatggctgatcctgcttgtttgtgtgatttgaaaagaatgggattgaatatatttaatacagcaaataatcatgcgatggattatggtcataatgggctattggcaactattaaatatttgactgatttagaacttccttttgctggaacaggcagaaatttagcagaagcgagtaaaccggctttttttgagacttcaaatggcagaatcgcattgcttggagtaacaagttcttttcatgactcatatgcagccggaccgcaaaatcaagatatgcaggggcggcctggagttgctccgttgaagcaccaagctgtatatgagttgagtgaaaatcattataaagcattgttggaagtatcaagaagtattggcattaatagttatcatgagcaagctataaaagaaggttatttgcctaggtgtgaaaatttaaagtttggaatttatgaatttagaaaaggagtagaaaatagggttcatacttcccctaatgagaaagatttgcaacggacgattgctgcgattgcagatgctaagcgtcaatcggatattgtaattctgagtgtacattctcatcaatttgctgatggaagtaagaaaaatcctccagaattcattaaaatatttgttcgtaagtgtatagatgcaggagcaactatcgttgtttgtcatggccctcatgttgtacgaggaatagaggtgtataattcgggtgttatattttatggattaggaaattttatttttcaacatgaggatgttgattacttacctgaagaattttactggaaatatggtaaaacaagagagcaagtaaccggagttagtgagataatgaataaccggagcaaaaataacacaataggtttatgtactcaaccggatgcttggagaagtgtaatggttagtattagttgtgatttggaatacttggaagtaagattatttccaataaagattatacttgaaggaaggaaaggtttaaaggggcttcctgtgttgacttcggatttatcaatcattcaagaaattaaaaacctgtcaatagaatttggtactaatattgaaatggcaaatgctaattttggatatataagaatctctaggatatgattgaaaatgaatttatgatggtcagcgttttatgccaaacatataatcatgaacaatatatttccgaatgtttacaaagtattgttgctcaaaaagtgaattttcgttatgaaatattagtacatgatgatgcttccactgataatacggctaatattattcgtaagtttgaaagagaatatcctgatttgataaaacctatttatcaggaagtaaatcaatggtctttagggaacaaggtatttagtggtatacaattgcctagatgtacaggaaaatatattgctatatgtgaaggagatgattattggactgatccattgaagcttcaaaagcaggttgatattttggaaggtaatgaaaatattggacttgtttatgcgaaagccagagtttatttgcagtcaaaatgtaaatatgcagatgatttatttggtgaatatcgtgcttctttgaatgagatgatatttaaaggaaatgcgattccaactctcacagccatgtttcggcgagaaatagcggtagcattccgacaagaattttctcagacaaaggggtggaagatgggggattatccattatggttgtatatttttgggaagtatgaagttgcttttgaagatgaagtaattggggtatatcgaatgctggaaaattcggcctctcatttgagctcatgtaaaagaaatattagatttagcaggaactattttgaaatcgcatactttttcgcagattattttggattaaataaaagtgtttatcatcatataaagcaaagttatttttcgtatgtagtaaggctatgtatacaaaagcaatataaacaacatgtaatttctcgttatttacgtagattttatcgtgaaaaagggccaaagattttatgtctgagagttatatctatgtttggttgtgggagatttgttttgaggtatttatataaacattgatctaactcatatttcactactatgaaatacataaagtttaaaatataaggatatatgaaagttttaaaaacgtcgataaagggtgtggtcattattgaacctgatctttttaaagattctcgtggatatttttttgaatcttttaatcaaaaggaatttaaagagaaggtatgtgaaactctttttgttcaagataatgagagtaaatcttgttttggagtacttcgtggtttgcattttcagaaacctccttttgctcaaagtaaattggtgcgtgttgtgaaaggtgcagtgttagatattgctgttgatatacgtaaaggctcgcctacttttgggcagcatgttgctgtagaattgacagaagacaatcgttgtcagtttttcatacctcgtggctttgctcatggttttagtgtgttaagtgaggaagtcatttttcaatataaatgtgataatttctattctcctcaaagcgaaggtgctttggcatgggatgatccagatttggatattgactggcgtataccatttgataaaataatacttagtgagaaagatactaggcatttaagattgaaagataccgagtggctgtttgattattcggtagattactataaatgagcagttgtatcctaatgaatagtttacctaattatttcaacactattatagtggtgataacctataacccggattggggatttagggataggattaaaagatatgttgagattgcagataaggcgattattgttgataatggctctgttcaagatgtgtctcaatacattcctgaaggattgaacaagcattttattatagtgaaatctcctcaaaatagaggaatagcttgggggttaaatcaaggagttttatatgcgaaaaatcacggcttcttatatctccttacttttgatcaggatagtttacctattcgagaaatattaaattgttatgcagacgtattgcgtcatgtttctgatgtaggacttataggcacttcttttacagaaaaaaaagcgataatgccatctcatgttacatatcgctcgcaaaaaacactaataacgtctggaacacttcatccggttactatctttgatgaagtggggttatatgatgaacagttgtttattgattcagttgactttgattttgtattgcgtgttaaaaagaaatttcatgtattacgtgtaaatgagcctttaatttaccatgaactaggtttacctgtaattaaatatggaataagttcatcaaatcataatgctattcgtcgttattatatggctcggaatcatgttttaatctgtagaagatattggaaagattatcctatgtgggtcttaaagaaaacttttatgttttgtggttctgttataaagttgatggtggtagaagataacataaaagaaaaaacgtttaatacaatacgagggctaaaagatgcctttaaactaaaatagtaatgtttttgacaatacagaagaaaacgctcctttcttttagtactctgttactattgtctttgatgatggtgtttatagcacaattatacattgttaaaatattatgtatgatagctataggtgtattgatgtctaagaagataagagtttcaaaatttgttttgttgaactttatttttatattggtttatggagttttaggaacaggtttggggataatttatcaaaaccccaacccatttcagttcctaggtgtttttttcttttggcctattttctggctgttttttatttcctatttctcaacttctcctatcttattggaacgatatttaaaagtattattcatttctcatacagtaatagttttatttgatttgttttatgccgtggcagcatttaatgggattaaattaccaaatcctttttatgggacagagacaggatttagtatatatgagaattccactagaatgacttttattaatctgaatacattgacattctccacacctattttatttatcctattcttttcacagtataaattcggaattagtaaaatatatcaggttattaatgtcattcttacaattatcttgctgatactttcgggtcgtaggagtgttatgttgatgtgtgtatcagtctttattatgcctttgcttttttctagttgtttttcaaaagaggtaaggagaaccacgggaaaagttgtgcttgtattactcgttatagtatttattggagcatattatgtagagaatgcatatcctggattttgggaaggctattaccaagtctttttgaaggcttttgattcttctgaggaacctataaagtttgctcaggccaaaatgtttattaatgcaatttttgaaaaaccttttttaggacacggttttggtgctatcttttttgagccgttaccagggcgtatgatttattcttcatattttgaattgtcatatcatcagaaattagcaactactggaattgttggatttactttgattatgtttgtcttcttatctactctttggtattcgttctacttatcaaaaagaaataaggatgttactttggtagcatttgcagtaggtttgttgtttatgctggttgcagatgctacaaatccagttttatgttcctttgatttaatgtggcctttatatctctgtttggcaaaaataaattcttatcaaataaattaaattttatgaaatactatttggtaatagtaaattacaataactgtaatgtgactattgattgtattctttctgccggaaaacttatagaagaaagtttttcaaaaatagttgtagttgataataattctgacggatcagataaagaaattctgagaagttttattcttaaaaatgtaaatttagatattgatttaatttctttagatagaaatatgggctattttcccgcccttaataaagggattgtttcattgaatttgtatggtcgtgatgatttttttttggtagttggaaataatgaccttctgtttccttccgattttatacaatcattgaaggcactaataattaatgagaaaacatttgttatctctcctgatatcattactccacaagggattcatcagaatccacatgtaataaaccggctttccttttttcgccgatttgcctataaattgtatttttcttcttatcctgtggcttgcatattaacatcgttggggaaaatattggggcgaaatagaagggaaaaatcgaggtttggatataataaagaacagattattagaatgggctttggagcatgttatataatattgcctcggtatatacaaaaactcggattacttgatgaaagtgtttttttgatgggtgaagaagcattattgggaaatcaagtatattcgaatggtggtgaaatattatatactccacaagtgaaagttattcaccaagatcattctacctttaaaaaaatgccatctatacatacttataacataacaaaggagtcgtataaagtttataaaaagttattgtaatgtttgaaaatagagtacttttgataaccggaggcacaggttcctttggtaatgctgtcttacgccgtttcttagattcagatatcaaagaaatccgtatttttagtcgtgatgaaaaaaagcaggatgacatgcgccatcacttgcagaatcctaaagtaaaattctacatcggtgatgtacgtgacaaacgttccgttgatggtgtcatgaatggggtggattatattttccacgctgcggcattgaagcaagtaccttcctgtgaattctttccaacacaggctgtacgcactaatgtgcttggaacagagaatgtgcttgattcggccattgaacatggtgtgaagaatgtcgtagtactttctaccgataaggcagcctatcccatcaatgctatgggaatcagtaaagctatgatggagaaagttgccattgccaaagggcgtcagttgggtgaaaccggttctactacgatttgttgtacccgttacggtaatgtcatggccagccgtggttctgtaattcctttgtgggttgagcagatgaaagataataaaccggtgactataacagatcctaacatgacccgtttcatgatgactttagatgacgccgttgacctggttatttacgctttccaacatggacataatggtgacctgtttgtccaaaaagctcccgctgctacgctagatgtcctggctactgcgttgaaagatttgtatcatagtgatgccgaggtgaaagtcattggtactcgtcacggtgaaaagttatatgaaacgcttgtgacccgggaagagatgtccaaagccatcgatatgggggattactaccgtattccctgtgatactcgcgatctgaactatgacaaattttttgttgaaggtagtgaggaagtctctcgtatagaagactaccactctcataatactcaccgcttggatgtggaagggatgaaacaacttttattgaaactttccttcattcgtgaagatcttcacctttaatctttcctttttattttaagaaacatataattttatgatacgagttggcataacgggccagcctggttttgtagggactcatctctataatgtacttggtctgtcccctgacgaattccttcgtatcccctttgaagatttttattttcagagtgaggacaaattgcgctcctttgtgcgtgaatgtgatgtaatcgtgcatctggcagccatgaaccgtcatccggatccccaagttctttatgatacaaatatcggtctggttagccagctgatatccgctatggaagccgaaaaggttaccccccatgtgctgttttcttcttctacccaggaggagcgtgataacgaatatgggcgttccaaacgtgaaggacgtaatctgcttgaagagtgggcgggacgtaatcgtgccagttttaccggcatggttgttcctaatgtgtacggtccctttggacgccccaactataattctttcattgccactttttgctataaactgactcatggagaaataccacaggttttacaggacagtgaggtgtgtttgatttatgtgggtaacctttgcaaacatataattggtaagatacgcgaagtttcttcgaatgcccttcctatggttgaacgtgatgtagtctcttatgactttgagaagaaagtaacggagattctggctttgttggaaaactataagtctctttacttcgaacagggcatcattcctgtcctgaaggatagggacgaagtgaatctcttcaataccttttgtggctatattgatttctcttccgtctatccccgtaaactggtgaagcatgaagatccccgtggtatgtttgtagaaactgttaagctgggtatcggtggtcaggtttctttctctaccaccattcccggtatcactcgtggtaatcattaccatacccgtaaaatagaacgcttcacggtcattcgtggtaaagcccggatccagttgcgtaaaattgatacagatgaagtcctgaacttctatctggacggtaaagatccctgttatgtggatatgcccgtctggtatactcataatatcaccaacgttggaaatgaagacctttatactcagttctggatcaatgaatggtatgattcttctgacggcgatacctattttgaaccttgtgataaaaatgaaaactataaattgaaatgagcaagcttaagttaatgactatcataggcacccgtccggagattatccgcctgtctgccaccattaagtgttgtgaccaatactttgaccagatacttgtacataccggtcagaattatgattactccctgaatcaggtgttttttgaagacctcggtcttcgtgaacctgactactacctgaatgcggtgggtaaggacttgggtgaaactattggcaatatcatagctaaatcttatcaacttatggtggaagtgcgacctgatgcggttctggttttgggagataccaattcctgcctttccgttatcggtgctaagcgtcttcatatccccatcttccacatggaagccggtaaccgctgctttgatgaatgcctccctgaagaaactaaccggcggattgttgacgtaacagctgacgtaaacctttgttattcggaacatgcccgtcgttatctgaatgctgcgggtactccaaaggagcgtacttatgttgttggctctcctatggctgaagtcctgcataataatctggaacagatcaaagctagtactattctggaacagctcaatctagagaagtgcagatatatccttctttccgcccaccgtgaagagaacattgatacggagaagaatttcttcaatctgatgaatgcggtcaatgaactggctaagaaatatgatatgcctattctttattcatgtcatccgcgttcaaagaaattcatagaacaacgcggttttgtatttgacgctcgggttattcagcaccagcctttgggctttcatgattacaatcatcttcagatgaatgcctttgctgtcgtttcagattcgggtactttgcctgaagagagtagttattttctctctatcggtcatcctttcccagctgtttgtattcgtacgagtacagaacgaccggaggctttggataaaggtaattttatactggctggcatcacaacggaacaggttcttcaagcggttgatgtagctgtggagatgaatcgtaatggtgctttgggtattcctgttccggattatacggatgagattgtatcggttaaggtcgtgaagttgattcagagttatactgggatagtggataagatggtctggagaaaatattgatctactatatgtgttctaaaagaatatgggttatttcagaaatctattatcctattaagacttcgacaggctattatttaactgaaatatctgaatatctggtaactaaggggcttgatgttcatgtgatatgtaccggttctacctataatgagggagaatctatgagtcttttgagagaagagtgccacaaaggagtaaatattcatcgagtttttcctcctaatctcgacaaaaataatttctttaaaagaaccttaagattatttttttctagttttcaattgtttttaaaggtgttgttttgggtacaaagaggtgatgaattattagtagtaactaatccggcatttttgattctgatgatgccttatgtggcatggaagaaaaagattaattatacaattcttgttcatgatatttttccagagaatttagtagcaataaagaaaatgtcatcttcttcgattgcttataaatgtttaaaacgagtttatgataaggcttattctaaagctcgtatttgcatttcaataggacgcgatatgactgaaatcttaatatctaaaactcgtacgaatgctaagatttcctttattccaatatgggcagagaatagagccatttatccattggataaaagagatacaaatttatatgaaaaattaaagctagaagggaaatttgtttttcagtttgctggtaatctgggccatgcgcaaggcattgataatcttttggctgcaatagaaaagattgatgttgaagacatacattttttgtttataggtggaggggcgaagtttgatgaaatttcttcgtttattagtcatagaggacaaaagaatgtttcattattgggttttcaagaccgttcacagcagaatgatttcctgaatgcatgtgatattggaattgttacgttgaatgacggcatgtatggtttgggagtgccttccaaatcatataatatatgggctgctggtaaacctatattatatatcggtgatgataactcggaaatagctttatgtattaaagaatttaccttagggtggattgtgtctcctaatgatccacatgcattaaagaatatgattgagtttatatatgataatagaaataatctgtcttctataagaaataatgcaagaactgtatcagatacaatattcgctaaagatcagatattggaaagatattataccttattaaaatagttgttgctatattaaaattgcttttagatgaaacttttattcacaggagcctccggatttttaggcaataacgtacgccctattttggagaaaatgtatgctgtcactaccgttggcttggcttcacaggataattatactgtaaatattgcaaaagacattcctaagttgtatgaacattatgatatcgtattgcatgcagccggaaaggctcattctattcctcgaacggaagcagaacggcaagtctttttcgatgtaaatctgcaaggaacaaaaaatctttgcaccgcattagagaaagttggaatgccgagagcttttgttttcatttctactgtagcagtatatggttgtgattatggggagaatattacggaagaacattcattaaatggaatcactccttatgcaataagtaagcgtttggcagaagaatatctacagaaatggtgtttagaacataatgtggtattaggtattattcgtccttctttgattgttggtcctaatcctccggggaatttagaaacgatgataaccgggattcgtaaaggaaggtatttcagtattgcaggtggtagagctagtaaaagtgtgttgatggtacaggatattgctcatttaattcctttgcttgttagaaaaggcggtatttataatgtatgtgatagttatcagcctacatttagagaattggaaacgctcatttgtaagcaagtggataaaccacagcctttatcaatcccttattggttggctaaagttgtggctttgataggggattgtttaggcaagaaggcaccaataaattcactaaagcttgataagataacaaaatcgttaactttcagtaatgagaaggctatacgtgaattgggatggaaaccgatgaatgtattggaaaactttcggatagaataattatgtgcttggggataatattatttgtgattggtgttcctgtctctttatttgcctgtattcaaatatggtttcattggattaataagaacgaataatgtattatataatagttttagttctgctatttttaacagaacttttttattttaagctagctaataagtttaatatcatcgataagcctaatgagcgtagttcacatagaaaggttactttgcgtggtggtgggattatcttttatttcggtgcattggtttattttttagctaatcattgggaatatccctggtttatagtagcattaactctgataacatttatcagctttgtagatgatattcgttccacttctcaaagtctgaggttggtattccattttgctgctatggtcttgatgttctaccagtgggatttattttctctttcctggtggtggataattgtagcattaattatttgtacaggtattattaatgcttataatttcatggatggcatcaatggaattactggcggttactccttggttattttagttactttggcttatatcaatgctaaaatagtaccatttactgaacctgctttgattaatactgttttatgttctgtcctggtcttttgcttcttcaattttcgtaagaaggcgaagtgttttgcgggtgatgtcggttctgtaagtatcgcttttattcttctgtttttgataggaaggctcataattaaaacagaagatttcagttggataatcctattatccgtttatggtgtcgatactgttctgaccattatccatcgcttgatacttcatgagaatattggtttaccccatcgtaaacatatgtatcaattgatggcgaatgaattgaaaatgtctcatgtaatggtttcatttatttatatggtagtacaaacagttgtaattgtaggctatataatgtgcttgaattatggttattggtatttgtttggtacggttctgttgctaagcctactgtatatctgttttattaataaatatttcgaattacatcaattatcataaaaacactgatttgatgcttaaataaagaggatgaagattgatctatctatattgtggaacaaataaaaaggctgttgtagaaagtggttatggaatcttgcggattgattttttgattatgtagatgctatacagtattattttgtaatataagatgcttcagttgaaggtataataactacggaaattaaagattataagtattcagaaactattcggatggtggtttttcttatagatagtgaaatgtgttcctaaagtataatgtttgagtctgttttaactgtgaatcgatttccacataattgtggaaaaaatactcaaaacaggaaaatactttttatactatttcttactcaaataattgatatatagctaaatataactttagtaatagctttggcatacgtcttgcattatattatgtgagagctaacaagaaatgtttaacttaaacaattagaattatgaaaaagttatttttagcagtagcattggtaatgggattgggtacttcagtggcatttgctaacaacatggtatcagacgttgaaattgcaacgatgatcaacgagtttaaaccgattgatgtaaaagaactcccacaggccgttcaggatgccatcaaagaaaactactcggaagccaccatcaaagaggcagccgttgaagtggctgaggatggaaccaagacttacaaggtaacgttggtggatgcatccggtacggagaatccagttcttttcaatgaaaaaggagaggttcagaagtaataggtctttattaatatcatattaaaaggggaggggcagaaatttgatttactcatatctgcttcctccctttttgcttttatttacttttgtgttttttacatcggtaaattggcgattacgtcttttgaacttacgggtaatttatcctcttgccccatatttacgaatactgtggcgcagagtactgtccattggtcgccataagtcatggtactgctgtggttataacctaaacaatgtccatattcatggaacatagcttgccgcgcatagttgtgcggattagatcccagcggtgttgcgtcaaaatagactccggtgtaacaatagtctgccaatccgtaggtggtacctcctcccagaccaccaacacctgatacgcgacctaatacgaggcctccatgactgcggattctctggcgtaatgcatccaggttgatggcatttcctccgttgtccttcagtttgccttcgtatttattcatttctgtgttaaactcttctgaagagaacatgaaagccatattggtggccaatgctaccccgtgacgacataataatggattcatgtgccgccaataagcgtgtccgttgtcggctgaataagctgagaaacgaatgaaccatcgactgtctatctgctctatcttcttcatgtatggatcttccgtccggataacaagcgtaacatcgtcaccggaaagttccggttgtgcaggtattactatctttttgccgctactggtggtgaatgttcggtcagagcttacgacgggcaacgggaaagtggcttccatgaaaggataaatcagatcgaaatgtgccaattcaaggaattcggtactgattttattgaatcgacataaaatcgtcacatcatgaatagcaacaggtgagaagaatttaaccagtaattgatgttcatccgagatggacacttgcaacggtgcgtttacataaaaggaacggtgcttactattatagaagatgtctcgtggctcgttggctaaaaacattgtgtcggtacggaagcgggagaaatcttcttcacggatataaagcaacccgtccaggctttccgggtgccggtaatcaatactgatgtgggagatacgacctgcttcgattttgcagttgctgaagcggtatttgtgtacaaacgatgtaccatcactgcggtttgactcgatcgttacgaatccggaaagtgcctctttacttggcaatgagtaaaatgaacgattttccgtgatgtcataagattcaatgctttccgtaccggagtattcaccatttgcactgagaccggcatatattccttcggcatcgtcaaatgtgatgtcgattttgcgtataaagcgccacatataatcggacgagacgtgcaggtctatatcaactttgcctacgcatctctccaatgtcacagtctgcgactccgcagtttgctctttgccaatgtgtacttctatttttttatagaaataaacgtcatcaagaggggcttttgcaacctgattcaataaccagatatctgacaattgctcgggttctttgatagtcgcatttgattccggattcgtggtggctaggaatacaaccgtatagtcaccgtatcccaatccttcaatggtcagtttggagaagtcggcctccagcttttgatacagcggtttgagcatttctccccgatcattggcaatggcataccacatgcgggcgatctgttcaggttcaccgttgcgtgtctgtatggcagaagtgtcatcttcctgcaatccaagaagaaatgttacctgaccgggggcaggcggcatgagcccgtattcctgctcaagttcgcctgaacagttggtcagtagcaatgccagaaataatagtatgatttttgcaatcttcatagaattcctcctttatttttttacacaacgtaaggatgcaaatgcttccatctgcaattgtctctcggcaatagcagttgtttccttgccttcaaacggtaaccagtaagtccatgcataaccaccgggacagccgttgcgttcgcttgtccataacacggctctttttccgaaagacggattattggttgtagacttgtcaccttttccacctgccaaagggataataaggtaacgtccggtatcttcagaagtaaatttcacatagtgttgcgttcctgttacaccggttggagtagtcagggttccttcgccaacgtggagtgtagcggttattttttctccgtttcctgctatataagtgccgggaatttcctgatttttggggagaagagagtttagttcgctgcgggttggcacacggtaaccttccggacaaggcatatgggtatcgttttgccaaggtatgtcggctgtttgattacccagattgtttgaggggttatatccttgccagggggtgtacatatacttccgtccatactggaacaaaccaccgatactgctgacccagccattacggtacatctcttcaacggtagcaccgtctaagggatatacttggtcttccagatcccggctgcgtgcattgaatgccatccaaatgctgccacccatttcaacggtctcgatctgcttgtcgctcggagccacacgaatctctacataatcataagagccgcttagcaaagcattttttaaatgtaccagaattgtatagcccagtcggccactaccttgtgcggccactgatacattgaatgctgatactatgccttctgtctcttcagataccgacatctcactgagattcacgccgctgtcagtgccttcagtggctgatatatcaattcgggtgtcggaaacaaatgccagtttcatgtcactgactcctgtggcgggtacctctactatattattctcataatccacagttatgccttccgggattttggattgggaagcattaagcaggatacgatgctctgtatcaggtttcccgataattgtttcgccttcttcccagggtttgatttcgaagattccttctactgtggcacctacgttgagtactgatagttcgtaaaccttattacgctctatacttggcaattgcatcttgagactgatgggaatttcattgtatgtaccacgcaggataatattaacaggacgtttgctttcgaaaatgcggaagattccctgttgttctccaccgaaagctggatcaaatttttttaagtaacttactgttttatctgatgcggaagcgttttcaatgaacggatatgtttcagccggagcatcctttacgattatttctttgattaatgttttgctgtctgctgtagtattcaggtctatacgggctacaccgcgtttcatgccaacgttaatttcctgattgctgcgtgtttggggagtactttccaattcaacaattgcagccataaagtcaggagctgaattattgtgcagttcttcgccgatggtcatattgcggaattcttcttcggtaataccttcttcctgaactggaagtgtcactccggtgaggaagtatagccgtgatccactgagtgcagaaatactggactggccattggattcgggggttaattgttgcgtcttgtacaagttgccatcgctgaactggaaaactgacacatcccgtaattcctcagaagaatctgaacctgaagtcgtaattcctttcactactaatgaataagtttgttgtttgccttctccctcaaacgatgcgtcatctgagcaggcgcctaaaaacaacgttcccagcaaggcgggaacaatgatttttttgtaagagtgattcatgttttttgtaaaatgttatattgaatattgatagtttttttcggacctttttccgaaagcgggtgcaaaaatatataatttttcaatatgagaattctttagtaccgggtttaagatattcttctttttatgaatatcatgtagaaacataaaagtagttcgaagtttacaactcgaactgtgggagggggagcaaatatctataaagcgaatgcgggtaccttcacaggcacccgcatttgcttttatgacttattcactacaaagctttattttattcttttgtagccatatactggaagtccgtttagttcttcttcgatgcgcaacagttggttgtacttagccatgcgatcggaacggcttaacgaaccggtcttgatctgcccgctgttggttgctacggcgatgtcggcaatagtggcgtcttccgtttcaccggagcggtgggaagtaaccgtggtatagccgtggcggtgagccatttcgatagcatccagcgtttcgctgagcgagccgatctggttgactttaatgaggatagaattggcacagcccatagcaatgcctttggcaaggaattctacgttggttacaaacaagtcgtctcctaccagctggcaacgatcgccgatacgttcggtcagcttcttccagccgttccagtcgttttcgctcattccgtcctcaatagagtcaatcgggtatttattaatcaaatattccatgtaatcaatctgctcatctgcagtacgctttttacctttctcaccttcgaagatagtgtagtcgtacactccattcttatagaattcagaggatgcacagtccataccgatttttacatctttacccggttcgtagcctgctgctttgatagctgccatgatggaatccagtgcatcttcagtaccgtccaatgcaggggcaaaacctccttcatctcctacggcagtgctcaggccgcggtcgtgcaatactttcttcaaggcgtggaatacttcagtacccatgcgcaggccttcacggaaagaaggtgcacctacagggcggatcatgaattcctggaaagcaatgggagcgtcgctatgtgaaccaccattgatgatattcatcatggggacaggcataacgtaagtatttactccgccgatatatctgtataaaggtatgtcgaggtaattcgcagcagccttggctacagccaaagaaacgcccagaatggcattggcacccaattttgatttagtaggagtaccgtccagttccagcatcttcttgtcaatggcacgttgttccaatgccgaccagccgatgagggccggagcgatgatagtatttacgttttctacggctttcaaagttcctttgccaccgtagcgtttcggatctttatcgcgtaattccagtgcttcatgttcaccggttgaggcgcctgatggtacggctgcacgtcccataacaccacattccaaaactacgtccacttctaccgtggggttaccgcgtgaatcgagtatctcgcgggctacaatcttttcaattttcataattatcttcttaatttaaacaatagttttccaaggataatgcactttcaatggcgtcgtctgtcagggagaagtcgatcaggcgtctcaactccttcagttcatccggatagagggcgcaataaaagccttttaccggcatccggagaaatatcttgcgggcgttcttcatgtccttgttcaactcttgataatattcgccgtcgatagagttgatatattggcagaaatgttcgaattcatcttccgtgaaggtgaagaaaagattgccgaactctacatggtaggcgtggcacttagtacaaaaggagataaaaccgtttgttgtccgcttcagtatttcttccataagctgatttttgtttgctgcaaaggtcgcacaaatgaggcgatggggcaatacctacaaatagtgaatatccttttcgtgaatacttatatattgttatttgcgaattatatcatattgtaatttataacctcgtattctccctcctgcaatctttattgctttccttttgtaatctcaagtctttttgtatctttgttcccgaccccaaatctattacaaaatgaaagtactaactatccatgatctgaaaattatcaagaaaagggcagaaggcacgctcttgctacgcgaagaaagcaatgagacggttgcggcgcaatgctgtgggttagcattgggaaccgagcatctgcaaattctgatctgtggcggtacaggttgcaaggcatccgacagccacattattgctgaacgtcttcagcaagcactcgagagaaataatattgccgacaaggtggacattatcactaccggttgtttcggcttttgtgaaaagggacctatcgtaaagattatccctgataacactttctatacccaggtggttcctgatgatgccgacgagatagtcagagagcatattatcgggggacggaagatagaacggctgctctacatcgatccgaagacggagaagaccgtcagtgactccaagcacatggatttctatcggaagcagatgcgcatcgctttacgtaactgtggttttatcgatcccgaaaacattgaggaatatattgcactggatggctatatggcattggcagatagtctgctccataaaaagccggaggaagtgattgacgtgataaaacgttccggacttcgcggacgcggcggtggtggtttccctaccggactgaagtgggagtttgccaataagcagaaagccgacatgaaatatgtggtgtgtaatgccgatgaaggggatcccggtgcttttatggaccgctccatcatggaaggtgatccgcactccattgttgaggctatggcagtttgcggttattccattggttctccgaaaggattggtttatatccgggcagaatatccgctggccatacaaagattgaaaattgctattgcccaggcacgtgaatacgggttgctgggaaagaatatattcggtacggatttcagttttgatattgagatacgttacggagcgggagcattcgtatgcggtgaggaaactgcgcttatccactctatggaaggaaagcgcggtgaacctaccttgaagcctcctttccctgccgaagctggttatctgggcaagccgaccaatgtgaataatgtggagacgcttgccaatattcctattatcctgacaaagggagcggagtggttctcttctatcggtacggaacgttcgaaggggactaaagtatttgccctggccggtaagattaacaacgtcggcttgatagaagtgccaatgggtacgacactgcgcgaggtgatttatgaaattggcggtggcattaagggaggaaagaaattcaaggcggtgcagacgggcggaccttcggggggatgcctgacagaaaagcacctggatacaccgattgactttgacaacttgctggcggaaggatcgatgatgggatccggtggtatgattgtaatggatgaagatgattgcatggtttctgtatcacgtttctatcttgattttacggtggaagaatcatgtggaaaatgtacaccctgccgtattggtaacaagcgtctgctggaaatgttgaacaagataaccgaaggacgaggcacgatgaaagatctggatgcactctctacattgggaaaggtgataaaggataccgccttgtgcgggttgggacagacttcacccaatccggtactgtctacgctcaataacttttatgatgaatacgtagagcatgtgagggataaaacctgccgggcgaagcagtgcaaagcattgctgacttataccattaatccggaactatgtatcggttgccatctttgctttaaacattgtccggctgatgccattctgggtgatgtgcgcaaaccgcatgtcatcaatccggataagtgcattaagtgcggcatgtgcatggcacgctgtaaattcaaagcaatcaatgtctgctaaaaactactgctatggaagaaaaacaaataaccctgcaaatagaccgccattatattaccgtgcccgaaggctcgactatcctggaagccgcgcggaaaatcggtatagatatacctaccctttgccatattgatttgaaggggacttgcgttaagaataatccggcttcgtgccgtatctgtgtcgtggaggtggaaggacgccgtaatctggctcccgcctgcgccacccgttgtacagaaggaatggtggtgcgtaccagtaccctgcgtgtgatgaatgcccgcaaggtggtggctgaactgatactttcggatcatccgaatgattgccttacctgtccgaagtgcggcaactgtgagttgcagactttggcattacgttttaatatccggcggatgccttataatggtggggaactttcgcctcgtaagcgtgaagtcacttcgtccattgtgcggaatatggataagtgtatattctgcagacgttgcgagagtgtatgcaatgaagtgcagacggtaggcgccttgggagccattcgccgtggtttcaatactacgattgctccggctttcgataagatgatgagcgatagtgaatgtacttattgcggacaatgtgtagctgtttgtccggtaggggcattgacggaacgcgatcatactaaccgcttgttgctggatctggaaaatccggataaggtagttattgtacagacagctccggccgttcgtgcggctctgggagaagaattcggactgcctgccgggacgttagtaacgggaaagatggtgtacgcccttcgtgaattgggttttgattatgtatttgatacagactttgccgccgaccttaccatcatggaagaaggtgccgagatattgaatcgcctgacacgttatatgaatggggataaatcggttcgcctgcctatcctgacttcctgttgtccggcatgggtgaatttctttgaacatcatttccccgatatgcttgatattccttctacggcacgctcgccacagcagatgttcggtagcattgccaagacattctgggcggagaagatgggtatttcgcgtgaaaagctggtagtggtatctattatgccttgtctggcgaagaagtatgagtgcgaccgcaatgagtttaagacagatggcagtccggacgtggattattctatttccacccgtgagctggcacgactaatcagacgtgctaacgtaggttttacgctactgacggataaggaatttgattatccgatgggagcttcaacaggtgccggtgtcatcttcggaacgaccggtggtgtgatggaagcggcattgcgttcggtttatgagatttataccgggcggacattggagaatgtaaactttgagcaggtgcgtggtctggccggtgtgcgccgtgcgacgattgatctggatggttttgaactgaaggtgggtattgctcatggtctgggtaatgcgcgtcaattgttggaagatattcgccatggacggaatgagtatcatgtgattgagattatggcatgtccgggtggctgtatcggtggaggtggacaaccgttgcatcatggcaactcggaggtgctgtatgcacgtgccaatgcactgtatcgggaagatgcacagaagcctttgcgtaaatcgcacgagaatccgtacatcaagactctgtatgaggaatatctgggtaaaccgctgagtgagactgcggagcggttgctgcatacgcattatttcaataaggcgattgattaacttattaaaacggagaaactatgtcagatatcaaattagcctgtgacgttgtcggacaagtgcgtgctatttgtgacaagcatggcaaccagccgggcgaacttatcaatatacttcatgaagcgcagcatctgcacggctatctgccggaagagatgcagcgcctgattgctgcaaagctgaatgttccggtgtcgcgtgtgtatggtgtggtaacattctatactttctttacgatgactcctaaaggtaaacatcctatttcggtgtgtatgggaacggcgtgctacgtacgtggttcggagaaattgcttgaagaattcaagcgcgtgctgggcatcgaagtcggagagacgacaccggacgggaagttttcacttgattgtctgcgttgcgtaggagcgtgcggactggcacccgtagtgatgattggagagaaggtgtacgggaggcttcaggctgtggatgtgaagaaggtgctggaggaactggagtagcttcggttataaggaagcagttgccgatagcctaaggaagcagttagcgatagcctaaggagagggttcatatatcgggcagtataagcagttataccgcccgatattttaatttataccgtccgatatatttatttataccactcgatatatttatttatatcgctcggtataaaaagatataccacccggtataatttattatatcagacggtatataaactcttcccttagggagccaggaggtctctccttagtggggtgggaggtcttcccttagtacacgatcttgttcagtatgccgttgaggtgggcaatggctactccgtagtttgtcatgggtacttgttgcgcacgtgcctgttcaatgcgactcagtacatactttctattgaacatacaggcgccacagtggataatcaaattgtatggggataaatcttctggaaaatcatttccggaaacaatatctatctgcaatccttcacctgttcgcttacgcagcaggtgggggatttttactctgcctatatcttctgtcagtggagcatgggtacaggcctcggctatcaatacgcgggattgttccgttagtcggtcgatggcgaatgcactttctacataatagtgtatatctcccttgtatccggcaaagagcacggagaaggaagtgagccggctttcagctggtttttgttcgtatacggtgtggaatacttgcgaatctgtgataattaattgggggggattagcaagtgcgcataatgtgtctttcagcttatctgtggtacaactcatgatcagacatttcttgtccagaagttcgcggattgtctgtacttgaggaaggataagtcgtcctttaggtgcctgaaggtcctggggcatgactaacactattacatcaccttctgctacgaggttcccggtgatggtttgttctccgaaatcggcaggcaacttttccagaatggcgcggtggatggcttcgatacctgtgctgtctttggcactgacgatgatgggaggctgtccgcaattcgcttttatctgttctgccagctctgtcgtattggggcgtgcgtcagctttgttcagaagcaatatgacagggatgcctcgttctttcaatcgttgaagccattcctgttcctgtgcgtctccggtttcacaaagcaatagggcgatgtcggtttttccaattattttcaaggtgcgttctacgcgcatttctcccagctcgccttcgtcatcgaagcccggagtgtcaataagcagacacggaccgagtggatgaatttccattgcttttgtcacaggatcagtagtagtgccgggagtgggggagactataacggtatcttgccctgtcaaggcattgacaagactggattttccactgtttcgccgtccgaagagggcgatgtgtaggcggttggcattaggagtctgattcattagtctcaatattaaggggttaataaatggggatttgatcattttaggcgcggattacgcggatttcacggattaaaggctgcgctataaaaaatccgcgttcatccgcgtaatccgtgcctaaaatctgaaatctcttttcccttcctctatctcatgcaggtttcgcagagctatttcccggatttttggattcgggatgcgttccatctcttcatgaatgaggcggatacctttctctcgggtttcgggtgaagcgtaatcttccagatattctttcagagtcatcaaggcattgggctgacagcaatttgctatctgtccccgtttgacaagagacatgaaacggtcacctgtccgaccttcacgataacaagccgtacagaaactggggatatgtcccagatcgagcagccagtttacaacttcatccagtgtgcggcggtcgctgatatcgaattgggccgagttctcttctttcgtttccggtacagcatatccgcctacgctggtacgtgagccgccactgatttgtgaaatacctaattccaataccttacgtcgtacagcttccgattcacgggtggaaatgatcattccggtgtaaggcactgcaatgcggattaccgcaacgaggcggcagaacatttcatcagaaatggcattggggaaatcttttgtttcaatatcatccgccgggcagatacggggtacactgattgtatgcggtccgacaccgaatgccgcttccagatgttcggcatgcatcaataatcctacgaaatcgtatcgataggtattcaacccgaataatacacctatacctacatcgttgataccaccttccatggcacggtccatagcttcggtgtgataggaatacttgcttttagggcctgtggggtgcagggtctcgtaattccccttgtgataggtttcctggaaaagaatgtaagtaccgatacctgcatctctcagccgacgatagttctctaccgttgtagcggcaatattcacgtttacccgccggatagcaccattcttatgatgaataccatagatggtctgaatagattccaggatataatcgatggggttgcgtagcgggtcttcgccggcttccagtgccagacgtttgtgtcccatatcctgcaaggcaaccacttcccggcgtatttcttcctgtgataatttcttgcgggcgatagtgcggttctttgcatgataggggcagtaaacgcatccgttcacacaataattggaaaggtataatggggcgaacattacgatgcgattgccatatagtttttgcttaatttctcgtgccagatggaagatacgttccgtcaggtcgggctggtcgcattctaacagtagagcggcttcacgatgggacaaacctttgcatgaggctgccttttcgagcagactctcaatgagggcacggttgtctttattggtatgggcatagtccagcgtatccagtatctcctggtgatcgatgaactcttctgcctgctttgaacttacattatacacgttttttagtgattaggggtgagtgattagtgattagtagtctcctctttcttttgatatccggtatccgataaccgtcagtttttcttctaattgttgtaagccttctgcagcttcggctcccaaagaggctttgttatcataaagtgagtatttgttccgttgttccgggggagaaaggtttggcattactacgttggctcctgccagtattccgcgttctcgtccatccggtgcgagcgttgctaatgctgtggtagagggtaataacaccttcggatgcattaaccggaagatggaaagaagtttcagagtcatctctatgcttcccggcgggcatgctgcaaacggggtatcgtggtgcggaataaaaggaccgattcctatcatttcaggatgaaattgctctataaaaaggagatcttccaccagatgatcggtgttctgtcccggactgcctaccataatacctgttcctgtctgatatcctatttctttcagccatgccaaacattgcaggcgttgtctgatagacatcttatcggggtgcagatgatggtaatgctcttcattatgcgtttcgtggcgaagcaaatatcgattggcacccgcccggaagaaatgctcgtaagtctcacgggacttttcgcctaatgatagtgtgatggcgcaatccggaaactcacgatgtatagcagtaacagtttcaaggataaaatcatcttttacagaggatgtttcaccaccttgcaagacgaaagtccggaaaccgagggtatatccttcacgacaacattccagaatatcctcccgtgtcaactcataacggagaacagattgatttccttttcgtataccgcaataatagcaattgttacggcagtggttggtaatctcaatcagcccacgaataaatacccgattgctaaactgctcaagtgacacctcccgtgcctgctcctgcagatactttaaagtatcagcgtcttggcaaaggagtagtgctttatattcttcagcacttagggtctgcttgttatgtaattgatcaatcaagttcttcatgctatttatttttcatccgcagatgacacggatcacacggattttttctctccgtgctcgttgtatactatagaagcatggcgcagccttaagagcagcgtaatccgtgttatctgcggatgaaaaatagtctatacgccgaaaggaagccttgctccagcgctacgctggttttaatacgtcttttcctgtttagctaattcttgtacaaactgacgtttacctgcggcaatctcattgtgcgtacaaggtccggtgatacagccaccttcacatgccatcacttctataaattgccccggtgctttgcctgatttggcatacgcccgcaatgaaccgatggttttcttatccagattagctacttggatggcattgattttgtcagcttcttctttcagataggcttttactgctcccattacgccaccagcctgggcaaatccatgtgcctcgcgcacggatgcaaacgacatggcataaggttgcgattgctccaactgaatattcagtccgtccaatacagatgccacttcttcgaaagtcataacaaaatctacagcttcatcacgctgggcctctttacgtttggctacacacgggccgataaaaacgactttagcatccggatgtttctctttggcaatgcgtgctgcataatacatcggtgaacctgtgcctgaaacataaggtttcatgcctggaatatgtttatttacgagttctatgtaggaagggcaacaggaagtagtcataaacttctgtccttcttccaacttctctatcaattcatgtgcttcgttgctgaccgtatccatagctccttgagccacttcgatgacatcagtgaatcctatagctttgagtgcgccatatacctgttcaatagtagtcttgaattgtcccaggatagacggtgccacaatggccactattttttctcctttgcgtatcttgtgcaggatatcgaatacctgtgacacttcgaaaattgctccaaacggacaagcgttgagacactttccgcaatagatacatttactttcgtcgatgtgttcgatacctttcttatccttgctgatagctttcaccggacaagcctcttcgcaaggtactgggatatagacaatagcatgataggggcagctcttgtggcaaataccacaactgatgcattcatcatggtctatccatgcctgtccgctttcctttacatggacagctttcttcggacagttggtctggcagctacgggcggtacatccgcggcaaaggttggtgatttcgtaattgatttgtacgcaggcggaacatgcttcgtcaatcacacacatgatgttatctttcggcgttccgttttctgcacggtccagtgcatgtactgcatactctgataatggggttaattcatctttttcatcttccatatccagtcccagtaacggcagtgatttgtatttccacacggcgcgttctttatgtacgcagcagcgtcctgcatgctttgaccttctcggactcaattcaatgggaagacggtctattttctctacaagttcgttatccctccacagttttaccagctctgtcagcaatctgtggcggacaatcataatgttgttggtaaatgccataatatttattctcggattagttagtcggtaattacggtgcaaagataatgaaaagttatagtttctatgaacctttctaccctcaatatgcttatctttgtatcagaatagaaaaacgaaattgacgatgaaagactttatttactatgcacccacacaggttgtgtttggagcattatcggaagataaaacagggaaattggtgaagcaatatggcggcgctaaagtcctggtacattatggcggacagagtgcggagcgttccggtttgctggataaaatatgccgggcattggaggcggaaggtattgcttacgtaaaactgggtggggtggttcctaatccacgtttgtcgaaagtgcacgagggcattgaactgtgccgaaaagaaaaggttgatttcattcttgccgtaggtggcggtagtgtgattgattctgcgaaggcgattgctttcggtgtaccttatgagggtgaagtctgggatttttatatgggacgagcccatgcggaagcttgtctgccggttgctaccgtgctgacaattcctgctgcgggaagtgaaatgagtaacagtaccgtgataaccaatgaggacggtgatttgaaaaaaggttattccaataatctgtgccgttgcaaatttgctgtgatgaatccggaacggacttatacattgcccaactatcagacagcttgtggtgtaacggacattatgatgcatactatggaacgttatttctctcatgatgacgatatgacggtgactgatgccattgctgagagtattctccgtacggtaaaagatagtgtttttgaagtactgaaagaaccggagaattatgtacatcgtgcccaaattatgtgggcaggtagcttggcacacaatgatttgacgggatgtggaacaactggtgactgggcaacacaccagcttgaacatgaactgagtgcactattcgatgtagcacatggtgcaggtctggcagctctttggggaagctgggcacggtatgtctacaaagaaaatgtaacccgtttcgctcagtttgccgtgaatgtgatgggtgtaacaaatgatttcaaatcacccgaacataccgctttggcaggcattgaagccatggaagatttctatcgcgcaattgggatgccggttagtatttgcgagctgataggacggcaggccactgacgaagaaattaaactcatggcagataaatgcagctccggtggtagtacaacaaccggaaatttgaaggttttacatcgcgatgatatggaaaatatctatcgcatggcaaatagataacggattttttattgtttttctgacaaatacttgttatctttaggggcatatatcaattggggggtagtaaaaaagtcctgacccacaggcaaagaatatgagaatacattttgagattagagaaaaactacctgaaattattgaagagatcctgaattgtgagagatggacaactttagtaaaagaggatatttcaggcagaaagttggttgtcatccgtgatccgaattacaattcggaggcgacagtagaaatctatgcccgcgagattaccatcaagacggcatggtcaaactacacgtatcgcttgtttgttttgggcgataatgtttggtgtgagtacaatggtgcttatcgcggactgttggaacaaaatctattgcctaccatcactcccagggaaggtttgttggagtcagaggtgttggatagctctttgtacgggagtgaaaagaggaaactcagagagtatgctgaagacaatttgaaactgaaaaaattccgacgcgagaactttaatgaagatcgtacaggtgtggctcattttgaccatcccaagagggtatatgacgaattcattaaagaagattacgtggtcccatcttccgacgaatagcgaagtaggaagatgattatcagtgccagtcgcaggacggatatacctgctttttattcggagtggtttctcaaccggataaaagaaaggtatgttttggtacctaatccgtataatcctaatatgatcagtagggtcagtctggaccctgctgtcattgattgcattgtcttttggacgaagaatcctgcaccgatgattgataaactggacagattgcaggactataaatactatttccagtttacactgaatccgtacggaacggaacttgaaagtaaactgccaccacttcaaaagcgtatagatacatttaaacgcctttctgataagataggaagggagaaagtggtgtggcgatatgatcctattcttacgaatgaacaatacacggttactttccaccaagacaaatttgcagaaatggcatttgctttgcatgactatactgaaaagtgtatgctgggctttattgatcattatccgcatgtgcgttcctttctccgtgaatttcatatcgagccgttgataaaggaagatatcgatgccatggccatttcatttaagaagactgcggatgaatgttcgatggagttggatacttgtacaatgaaggtcgacttatctcatttgggtatttcgggtggagtgtgcgttgacaataggttgattgaacgaattgtcggatatcctattattgcccgtaaagataagaatcagcgggacatttgtcgttgtgtggaaagtattgacatcggcacttatgaaagctgcctcaatggctgcatttattgctatgctattaaaggtaattataatacggcgaaatttaaccggagtaaacacgataaggattctccgatgctaataggagaagtggataaggacgcagtgattaaagaacgggaaatgaagagtctgcgtaccgatcagctttctatgttttattaaaaaatcattctgaccggaaacaattattgcttggattgttgtacctgataaataacttataatttagtgtatccttaaaataaagagcatggagaaagagactgagcaagaattgatcaaaaagatgattggctttcagaaagaggaaataacgtcgagtattatataccggaagttagcggcaaaggaaaaggatattcataaccgggagatattgcaacgtattgcagaggatgaaagtaggcactacgccacactacgaggctatactcatcaggatgtcagtcctaatcgttttgaaatctgcttttatgtatggttagtgcgtctgctgggtgttacgtttgccgttcgtcgtctggaactgggagagaaagaaacgagtggggtatattcccaatacccgagtatggaacactttgccgagatggcgcgggatgagcagcaccatgaagaaaagcttattgaaatgatagatgaggagcgcttgcaatatatgggttcggtggtcctagggctgaatgatgccttggtggagtttaccggagcattggcaggtttcacgctggcgctgaatgatacgaaactgattgcgctgaccggcagcattacagggattgcagcggcactttctatggcttcttccgaatacctttccactaaatcagaaaagactcataataagcgtccggttaaggcagctatttatacggggatagcttatatcataaccgtagtggctttggtaggtccgtttatcttattgtcaagtcctgttttggctttatgcatcatgctggtgatggcattgctgattattgcctttttcaactattattatgccattgcccgtaatgaaagctttaaacgccgtttcacggagatggcggtgttgagcttctccgtggccggaatcagttttctgataggttatttgctgaagacagtgacgggagtagggggataggcatatccggatccggactccctttagatatcctcagtgtacaactgactgcccgaacgaaatttacttttcatgaaacgtaccagtgatgccggatgatggatactcttgaagcctataaggcttacacctatgaatgggctatgaataatgctgcaataagtaggctgttgataggagaatgatttaaaaagccctgaaatgcgaaacttcagggcttttgtattttgtcaactgatgaaaaatcaactgaattatattttggaactgtgcagttttttatagagttctacacgttcggctatttcagcttgagatagattggccggaagctcaattgttgttcgtggagtaattgctacaagaataacttctccaacttttttcttatgctctttaagagcgttttctgctaactgattggtctctggtcggacaatactctttttcatcatattgaattgtttttaagttttcattttcgctggggctaattggcaggttgctaaaaggaactcattgttcaatgtggttatcacttcttttacgctgcgtattttttcggagagaaaagcattgctgcctgcaaatgcatatcctcttttcatatttcctttggccgcattatacagtgctttgatgatgcagtaaggacttttctgatagtcacacgtcttgatgcaatggaacgagcaacatttgggcttttcctgtcctttctctacattacggataaattctccatcaatggctcgtccgggcattcctacgggactttcgataataagaacgtcttcaggtttagagtgaatataaacctctttgaaggtttgtgaagcatcgcactcttgagttgttacaaaaatacttcccatttgtacggccgaagctcccaattgcatgaatcgtgcaatatcttcgcctgtagagattccacctgcggcaattacaggaatatcttttctttccttatagctcattgcaattgctacaacttcgggtatcaaggactccaaagcgtatttctcatcttgtatttgttctttcttaaagcccaaatgtcctccggctttagggccttctactactatggcatcgggtaaataatcaaagttcttctgccatttgtcgcatataatcttggccgctcttgaagaagatacaatgggcaccaacttcgttttgctttccggtgtcaggtataggggtaagtcgagcggaagtcctgcgccggcaaagactacgtcgattttttcgcttatggcagtgcgtaccatctctgcataattggaaagggccaccatgatattcactccgatgattccttttgttttttggcgggcttttctgatttcctctttgagtccgcaaatgcacttttcggtatagtcgcctttgcctttagggtatagcaggcctaaacctgcacatgaaataacaccaatgccaccttcgttggctacggctgatgccaggccggacaatgaaattccgactcccattccaccttgtatgataggtgtttttatctctatatttccaataaaaaatggcttcataaaactgatattgtaataagactgtaagcggataaatatacttccgggtattctattcgtttagcgatgttcttttctttgtattgctgttttagttgaaaaaagcaagaacagaagatctgatctcctgttcttgttgtagggtagacattaataacgtctggaattataaccgttgttacggggtctttcttcacgaggacgtgcaacgcttactgaaatagttttctgatcgtattctgctccgttaagttcattaattgccttttgtccatctgtatcgcttgtcatttcgacgaaaccaaatcctctggatcttcccgattctctgtccataataactttagctgaagaggtctctccatacgctgagaataattcgttcaagtcagcatcatttatgccatagcttaaacctgaaatgtaaatgttcatttgaaattttaattaaataaatattaagtaagagtgaggggataattaaaggagaggtctgcttaataagatataaaaaggagaactatacgataacgattcgtaactcaaaccgcgacaaaggtaatacaatagttgggaatggcaacttttaattcgtaatttattaataaaaaagcgataattgttgtttattagcattagagggcttaaaactccaccttatagaggacgtggcggagcagagggtgattggcttctacgagcggatgatcaaattctttagtttttaccatacctatcttctgcatcacacgctccgaacgcttgttggggagtgaggtaaaggagtataattctttgagtttcaatacggtctttgcatgctccaggcaggctaaagcggcttcagtggcgtatcccttgttccagacttcgggaattagtcgccagcctatttctatggcaggagcaaaatctatatcgaatgtaaccgtatgcaatcctacgtagccgataaaagaatgatcttctttcttttctactgcgtatagcccgtatccattggctgcaaattcttgttggatacggtggtagaaatcaagagtttcctgataagatagctttttgagaaagaattccattacctgatcgttgctatttaatccggcaaagacagggatgtcttcttctttccaatcacgtaggatcaggcgcggggtttccatgtatgtattcatcttgttctgaatttattcgatttgttttttccgctttttacggttcatatattcacgtagtagggttggggtggcacagaagatgagttgtgcccgattccatttatagcatttttgaaagacaaccatggcaatggttatgaataaggctgctccgatagaagcctctaaaggtaaccagcccagattctctttgggtaatagcataggaatgaacgccagtgctccggcaggagcaaagtatttccctgtccactcgaagatgaggaataggatagccgcaatggttaaagcaacgatactttccggtagatgaagatggtagtgaccgacaatttgaagtacagtacccagagtggctgcggtagtcagaaagagaaatacttgtgttgggcgattcctgaatcctgctttggagtttaccatttctacaaaggtcaccatgagtgggggcaatatgagatagggataatccatgccgacggacaattcggccaaagcacctacaaaacagaataatatcagccatctgatgatatcttccttgccgggttttctgtcgacaggtttaggcatccggttacgtattccgcatttttccagaatgatttgtacaagcactactgacactgacattgaaaagactgctatcggataaacaatactttccgtatgaagcaaaacaggcaatacgcaagctgatatcaaaggaatcagtgtagcgcgactgattaaaagggaagcacctgcaaaagcaaatgcagcgcatagattgaccacatagggcaggggtgaataacgaacaatgcagataccgactgctgctccaagagtcataagcaggatgatttgccaacgttttacattccatacccgtttatcgataatcaacaggccgatgatcagcgctgtcatttccggaaacagaatctccttttcatcggtccattcggctaaaccgaccatcatcaggatcatcaccagcgatatcagataccttgtcagttttctgtgttccattatataatcttgaattttgggcacaaagttaagggaaactgccgtattatgaaacttcttggctatctttgcgcgctgaaaaccttgagtggctttctttataaaagagttctgtatgcaaaatttggtaaagaaggagtataagattccttttattctggtaacttccctattcttcttatggggatttgcacatgcgatattagatgtgctaaacaaacactttcaagatgtgctggttattacacgtgcccattcggcatgggtacaggtcatgttttacctgggttatttcgtgatggctattcctgccggactgtttatcaataagtacggttaccggaaaggagtagttttcggtctgttgctttatggcataggctccctgcttttcattcccggagaatattggatgtctttcaacttttttctgttttccctgtttgtcatagcctgtggcttggtttttctggaaacagcggctaatccttacatgacggaattaggcgaccgggaaacggctgccagtcgcctgaatctggcgcagtcgttcaatggattgggctgtatttgcggtccgcttatcgggggattgttattattctcggaagggggcgaaagcaatatatcattgccttacacactgatggggatcattgtattgggagttgctctggtattctataagatacgcctgccggagattgttcatgaagctgatgaagaagaagtcggagaaaacggtgcacgcgggctttggtcgcacaagctgtttatcttcggtattatcagcctgttttgttacgagatagctgaaatctcaatcaacagcttctttatcaattatgtggtggatgacggctggatgaatgcccgcgatgcatctgtagtactttcgtttggtggtttgggactgtttatgtgcggacgttttgccggtagctggattatgcggtatatccgggcggaaaaagtgctgttcgtttgtgcaataggaacggtggtcagcacgtctttggtagttcttaatctgggcattttgtcattaatagccctgttcctgggatatgcgttcgaagctattatgttccccacgattttcgctctttcattgaggggattgggtaactatacgaagcgtgcgtcttcttatctgatgatgtcccccatcgggggagcggtaggaccgctcatgatggggtatgtggctgatcagaccaatatgtctttctcgttcatcgttccgttgctttcgtttatcgtggtgttgctttatgcctggaaagtaaagcaacgttcgttttgctaatatccgaacttttccgcagccttttccatctgttcgatgatggctactccaaagggacagttcgtttcacattgtccgcactgaatgcactccgaggcatgatgcgagagcgtcttgtagtgttcgcgtactgtctcgggtatttcattctgggcaatggttaggttatagtacttatttacactcgctatatcaattcctaccgagcaaggagcgcaatgtccgcaatacatgcaatgcccctgccagctaaacttttccatacctgccataattggggtgtaatctttttcttctttagtagcattgcaccagttgatggcagcttgcatctcatcgcaacttttgcaaccgaccattacggaagcaacagccggacgggttagcgcatattcaatgcactgcaccggtgtcatagctttgccaaagggagagttcgtttcactcaataagtctccgccgccataggctttcattacatccagacctatacctttctgctcacagagttcataaagcttttcacgttccggatctatattttcaagggaatgagcatagctttcgtcggcccataaatcatctacattttcgctgggtggttgcaaatcgtaacagggattgatggagaacatcagtacttcaatcaatccactttctacagccaaccttgccacagtagggttgtggctacttagtccgatatggcgaattttaccttcttctttcagacgcagggccagccgaatgacaggaccattgaatacttcatggaaatcttcttcgctatctacgtagtgaatcataccaatatcaaggtaatccgtatgaagacgtgtcaactggtcttcaaaagaagcgattgttttttctacatcacgggtacgcaggtactgattgttttcccaggtagtacatagatgtccctgaatgataaactgttgccgacgtccggtcaatgccttgccgatattactgcgcagatcggggtttgaggcatacatatcgataaagttgattcctttactgatggcgaaatccatttccgaatgtacctgttcttccgtttttcccacgaaaccttcacagcccagtgcgatgacactaactgataggcctgtatttcctaatattctgtattccatgatatttcaaatccttagtatgtttttgcgaagttactaatattaaagaaaacgttcccgttttaatccgaataaatttgcactgataaatagtcggggatggatatatgaaagcttggaacgattgagatgaagactatttattttataattatccggaaaaacggaaacgcttatgatgatatggttttatgaaggtccatttttatatagttataggattttaagaaagttatccgaaggcatgtttcagcctctccaaacctttagccaactgttgccgtggacaggcaatattgatacggataaaattgtctccgtcttccccgtacatactgccttcattgacccagaccttttctttttccagtagagccgtcacgatttcttctgatgacttcttcaacaccgaacagtctacccataccagataagtaccttccaatttaagtacggggaaatccggtagatgttcattgaaatagtttctcagatactgataattggcaaacagataacttttaagttcttccagccattcttccccttcattataggcggctatcaatgcctccacaccgaatgggttcacatcacaaacctcattgatattaatggctttatctatttttctgcgtatatctgcatcagcggaaatgatgtttgcaatctgaagcccggccaggttaaaagctttgctgggtgatgtgcaagtgacggagtgcatccggaactcttctgaaagagatgcaaaaggtgtataagtatgtcccggaaagaccagttcacaatgtatttcatctgataccacccatacattatttcgaaggcaaatctcaccaatacgtattaattcctgtttgctccagactcttccggccggattatgcggattacacaataacagtaattttattttcgggtctgccgctttcttctccagatcgtcaaaatcaatccgataggtgttatcatcatagatcaatggattggaaatcatttcgcaatcattattacggatggaagaaaagaagcaattatacaccggagtctgcaccagaactctatcaccaggattcgtcagggcttttatgattgctgataaagccggtactactccggttgtatagattatccattctctctctattttccaattatgacgtctgccgaaccagtggattaccgcatgataatagctgtcaggcacgcggacataaccgaagataccatgttctacccgctttttcagcgcttctgtcacggctggggctgtacggaaatccatatcggctacccacattggcaaaatgtcggcatcattggcagaatcccatttataagagttcgtaccccggcgtggaatgatttcatcaaaattgtatttcatacctaatcagtcaaaacaggtttggtcgtcccataatttcaattcacagttgcccggtgcttttatattctcatccaggattatagctccgaaactttcggcagtgatacttcctgtacgtggattttttacactgtgaaccggactatggatagtggcctgtacactgctatattcaaaagcgaggtctgcatcttctgtcatcgtgcagttttccataatcagatcgtgggcatagcaaagcggctgtgtacctgaaatcttgcagttcaccagacgcagatttctggaatgccagcctaaatattccccattcaatacagagtcgtaaaccgtcacgttttccgtattccagaaagcatcctttgaattgattaccgcattacggatttctacgtttttgcagtattggaaagagtagttaccattcatctcaaagtcatcaatcctgatattttcaccgtgtacaaacaggtaatcacctttgtctacttttacattcttcaactctacattccggcaaaaccagagggtttccagtgcatagggcagttgtacgttttccaaccggataccatccatttcacggaacatcttcggtgcttctaccaaagtgtctgtcatttgcagattattggaataccagagggcggcacgtgctccttccgtaaacaggcagtttttcacaacgaaaccatcgttatgccagaaaggatattttccttcgaaacggcaatttatagcttcgatattactacattctttcagggcagattcgccggtatggatcgttacgttttccaaatgaagattgtgagtggcgaacaaagggcgttcaccttcgtaatgagtgtctttaattagttccattattcaagttttttgcttgttgtttattaaatgattgattatcttttttctatattgcaaaaatacggcgtaaatgggatactctttgtagacggattacggacataataacccggattacagattatatagtgcaagctacgagctttgtttctttatttcttatgcagccatttccattctgatttgcctttcggattgtgtagcacgtattcttaatacgacgaatacaatgcttaaaataaggaatatcaaagagccgatgacggaataacgcgtattgaagaaggtgataaacaatccgcagacggctgcacctactgtagtaccgagattggcagacaacaaatacagtccgttggcaaaatccggtgcttcgggagcggcatgcgttatcatatattgcatggtgttctgtccatatcccgccagaattcccaggatcagaatgataactgccattgccatcagccattccccaaaagcgaatactcctatataaaaggccagtagtgtcaaaggaatcattatcatgctacgtaccggattgaccgccagttgctttccggctattacatttcctataatattggccagtccataaatcagtagcattgtactgattacggtgtacgaaaccccggtgattgtcttcaagtaatcagacatatagctgaagaacccgaataaggctccgttaatcagcgtgatagcaagaatggagtaccagactactttcttttttaatacaccgagttgtgtaccgtaggacagtttctctttgaccggcatggaaggtacaaacaggatggttgcaaccagtaccaatgcatttacaacggtgaagaataacatgcccattgaatatgaaacttcgcttgcaatgtaacttgtcaccggcacccccagcaccataccagctgatacgccgatgaatacttttgctaccgcctttggtgccttttccttactgacagatgctgccgctaccgtgaaagccatagatacatataccggatgaaggaatgccggaagtgcacgggatatcagcaatgccgtaaaattagtggtcatcatggagatgatattacttaatgtaaataatcccagtgccagtatcatcacctttttccggttgatacccgagaacagtaagggggtgatgggagcggatattgctactaccagtgcaaatatgctgaccgtccaacccgcttccggaacagttacttgaaagttctcggctatcaggggcaaaattccaatcacccccatttcggtattgattattccgaatacaccggttgtgaggatgaatacaagtagggtgcttgaattgagtttgaatttattcttcatatatttctttttttgtactgcaaaggtcggggaaacgtagcatttcctttgtagataaattacggatatgataaccccaaatacagtttctcgtaaatgcaaagcgccccgctgcacgatgatgatgcagcggggcgcttttttaagttgaaatatggcgcaacagaatagtatcgtcaagagtcgcgtttctcgttgaataatttatccgtctcctccatccctacaatttcccaaccacggaaaacgatggtaatcagtttaagttgcgctccgccgatagtctgtgcgacaatctcgtccgaagcgtacttcagcaattgcgtccgggcttcttccttcagcgtggcgatgcggctttcgggctcatcgcgcttcaggtacttcacctccatcaggtaggcgtagcggatatccgatatctgcggattggggcggaagtagaagtcggcgtagccctttcccagttcatattcgggcatcagctggtagaagttcgtcatattgagataggcaagaagaaacccctttacgtgcgcttcaccgtcgatgaattcgcggatgcggctctgcttctccagttcggtggcgatgtaggtgaagaggggttgccagtcggcacggtatgccatttcttttgccagtttacccagggtggagatgttcaggctgaagatgttttcatctgcgtaagcctccgtcaggtagttgtagaactgctcgcgcacggtgttgttagggatggcaagcacagtttcgccttcctccacgccccggatactgagtaggccgaagtagtagagcaatgacttgaagttattctcgtccaccatcttctccacggagaaggcgctgctgatggtgcctgatgtccgtccgttttccacaatttcgcggatgacggagaagttggcgtccagttcgtggtctatccggatgaggtggcgcaacttgttgtagtctgtgcggatgttggtgtccaccatttctctgggctttttgccaagtttcagacaactgttcatgtagtagagcgtcatatcggagttgtacatgctttcgttcaggcattcctcggagaagtggtagttgtcgtaccagggcttcatgtcggcgatcatttcttccacgcccatcgtcagtgcgccccggtcgcggtaatactccaacatggtgcgcagttccgtttcggtgaagcccacaagggcgttgaacaacggtgaggtagtgatgttggttccgatattgaaaccgctcgtcacgtcgtccagtgtgatggggcttacaccggtgataaacatacgttccagtgccatgccgttgccggaggtgaggaacttgagcacgttgaagaagtatcggaagaagccttcaccgtgggtggccttgcgatactcgtctttgccgaaggtggaaaggatggtattggtgaagttgtcgtactcgtcgatgatgaggtagatgcgcaggcgcaggcggctggcggtgctattgatataatccagccgtgttgaagcggtggttcggctcatcaattcttggcggaagccgggctgaaacaggtgttcgtacttgtcggcaaactctacgagacgccctgtgcaatgctcctcgaacgattcctccagccttccgggtgtggagttgacggcggagaagttgaaccggagtatcatgaacttcgccctcagcgccgttgggtgctcgtatatccaccgctctccgaagagctccttgaagtggtcggcgttgttgatgtcataataggcggccagcatgttgatgagcaacgtcttgccgaagcggcgggggcggatgaggaagaggtagcgagcttcttgctctatcagggggatgaagtgggtcttgtccacgtagtaacaattgtcacgggtgaggctctcgtagtcgctcagtccgtaggggatgcctttgatgctattctgttccataattcaacggtgttacttaatgcttaatacttaaaacctaatacttatcatagggcaacaaagataacatttatttcgctatcttcctgtcacggctgatacttattattctctattcaagcaaagcgccccgctgcatcatcattgtgcagcggtgcgtttttgcttgaatagaggtgcggtgcgttgtcttcttatcccaacgggtcttcttctaagccaccgtctccaccgctcggtttaccggaaccggtgccgtcaagaccactgatggagctgacgttggtccacgtcacattctcgccgatgagggcgcgggtgacggcgctaccttggcggcgcgactcggggatgaagcggacgcgggtaccggagatttggttggcgttcaccttctcggcgctgtccacgcccttgccgttggagacgcaggtgtagtagaaggtgcccagaccttctacatggacggtgcgaccggtgttcatactgcttcccagcaccaggccgagggcttcgagcgtggccttgctgtcggcgctgctcacggtggagatgagggcgatttgcttgcaaagctcgtccatttcgataggtttacccacgctcacggcttggggatgccacttcttggacatctttttgtaaataggtttgaaaaatgccatacgttatggtttttaagtaaaacatgccctgtagaccattctgaaggaggtgggagacttataagaagtgtcatcgatacttgtgctaagtatacctgatacttgtgctaagtgtcgagcatacttgtactaagtatcaacaacggtctttaggctcttctacggttcatcttgactgtcaggatttatttaattattgcttgttgaaagtatttcagttgatgattagggggatttttcgcatattccactgatttgttcataaaggacgcatgcacagctacggttgtccagataacgcagtgccacataaggaactacttcacaggagatgcgcagatgcaaggtagcaatcacttccgcaaggcgcggatgaaaggaataatcccgtccattgtatatctgtacccatacatggtctcctttcttgatgtgtagttctggattcttcataagctgtataattaatgtgattgtgtggggttacttgcatagtaacggcagacaactatagcggtgcaggttgaaaaagcgtttttggacggcacccaacccaggaatgagcatataaacagaagttgtcttggtaataaggcgcacaaatagtgcatccgttttcagggattgaaggcggaattatatttcgtatatctattaggatagtaaagaggagtccagatagtaaaatataagattaaatagcttttttattagcatttgtttgcttttttgtcaaaaagtatgcatctttgtatgtgacttttgccgttactatgcaagtaatatcaccttaataaagtgccgtacagcatattgatgctatctactttcttctttttacttcctttcactaaggcaatcacttgtctgtttactttgtctatcacctccgcatcaaagggcttcagataactcatcgtcacccgtatggacgaatgtcccaacgactggctgataagtccaagaggtgttccgctatgataagccagtgtcgcccacgtatggcgggcggtatacgaactcacggaaacgccgggcaggagtttcttcatcaaccgtgccagttcccggttgaagcggcgcagtgtatcctgataaagatgataccgttctttacccggagatgtctcattcagtatcgggaacaaatactccgattcagccctgtttctgtacttctgtagcaaccggaatgcgtccggcggcacgtccaccatcatcaatttacctgtcttgtgacgccggtagacgatacgcctgccttgcaagttctgtttccgcaaatgtgccaggtcgatgaaaggcataccgcgaagcatgaacatcagtaggaagtaggccagcacacgctgttggggcaacgacaatgcgctgaaatccgtagtctccaactgccgcatctgttccgccgtcagtgcccgcttggtgcgcgactctactttggtatacaattccttgaacaatatcggattgtagtctaccatgccgggtggcatccagcggttataaactgcctgaagcgtgcgcatgtaagtggaaatagtgttcggactgcattcacattccgttagccatgtctcatactcctttagtcgctccggcgtaaagacatcccgtattggtgcaagggcgttcgacattgatgtcggatcatctcgcatcggtgcagaggcattccaaaaacgggtaaaagagcgcagtacgctccggtaaacatgtgctgctggaaatttcccttctttttccaagtcggcaattaccgtctccatgtagtcagtcaggttatcacctgctgacactacatttttcttttctttatcttccataacggtactaaaattaatcttcatccaaacaggcacaagttcagcaatgtttatgagaataaagaataacctattcctgctgttcgccaataggcatcgtaaatgatgttttagtttcttttccgtttaattagtatactcttacgaagaaagccgatggatgtgtctatttttgtccgaaactaatacaatacatttatgaaaaaacttagctatcttgttttatttttcctgttagctattcctgtatcggcgcagaatcagttcaagttgagctctattccttttcttctttcctggcataacacgtctaaatcctttcagatgacagatattaataagcgtatttccactattccgcacaatctgattatccacaaccgccctgttgattacgaaatagaaaaagaccggatcagcataactgcggcaggaaagacgaatcttttcaacagcccttccgggaaatcgaaggttgcgaacgctccacttattctgtttgagccggaagccgattttacaatgagtgcacgggttacaggcaaattgaagtcgatttatgatgtagctgcccttgtcatttatcaggatgatgatgtctgggcgaaattctgttatgagaactcggttcatcttcagccgacaattgtttccgttgtcacccgtactttctctgatgactgcaactccatgccggcaggcgattacgcatatatggcagtagtgaagaggggatcggaatattcattcttctactcctctgacaataaaaactggttgatggtcaggaatttcaatcttgggacgaaggggaagattaaagtaggtttcgcggcacacggttctcgtggcgacggctttacgggagtattcagtgagataaaatatcagccgaaagctttggatgatatgcgaatgttgtctttgttttgaagctgtatcctgaaatttgtacccttattacggatatgataaccccaattacagatacctgatttctcaattgaaataatttctatctttgttgcagttcaaatacttatgaatatggatagagttataaaattagataatgtagatcactataacagtctctacggactggaaaccctgcatcctctggtgagtgtggtggatcttaccaaagcaaccaaatcggtcaatcatatccaaatgacctatggcctttatgcactctttctgaaaggagctaagaactgtgatatcaagtatggtcgccagcattatgactatcaggaaggaaccatcgtttgctttgctcccggccagactgccggagtagagatgctgaatgatgtagtgcagcaagaagtgtacggtatcctctttcatcccgacctgattcgcggaacctccctcggaaagacaataaaggattatactttcttctcttattcagtaagcgaggctttgcacctgtccgatcaggaaaaagagaccgtgatggattgcctgaaaaagatcagtatcgagctggagcatcctatcgataagcatagtaaagcattgattgccatgaatatcgagcttctgctcaattactgtatgcggttctatgaacgccagttcatcacccggagcggcatcaataaagactctcttaccaagtttgagcaacttctggatgaatatttcagaagcaatcttcctgtgcaggatggcttgccgtccgtgaaatactttgcggataaaatctatctctcacccaattatttcggtgacatgattaagaaagaaactggtatgacgcctcaggaacatattcagatgaaagtgattgaactggctaaagaacatatcgttgaaacggacgagacaatcagcgagattgcttacaccttgggatttcaatatccgcaacacctcagccgcctgttcaaaaaacgtgtcggctgtacgcccaatgaatatagactgcaaaatgtacagttttgaaaaaggatatattgaacatagagaccgtacaccagtgcaattgctgtttgggaaataagaccttacatccgttggtgagcgccattgacttatctaaagccaatgtgatgcagcgtactatcaagttcgatttctacaccatcttactgttggaatgcgaatgtgaggatttcatctacgggcgtaagtattacgactattctaatgcaacaatgattttcctgactccgggacaatccatcaatatcaacgaaggaaaggcatttccccgaaagggctggttgttggcttttcatcccgacttgctttgcagcacttcattggggcggaatattaagaattactctttcttttcttatcatctgaatgaagcgttgcacctttccttgcgcgaaaaggataaagcaattgaatgtatgtacaatattgagaaggaactgcaacatgcaatagactgtcatagcaagaccttgatttcaagatatatagaactcctgttggattattgttcccgtttctatgaccgtcagtttatcactcggaatgaagtcaataaggcgatattgaacaagatggatattgcattggatggctatatccagtccggacaattgaaaaacggtgtattaccctctacaaaatactgcgcagatatacttcatttatctccccgttatttcagcgatttattgaagtttgaaacggggaagaatctggatgaatacttccagttgaaaaggctggaagtcgctaaggagatgctattaggcaaaggttatacagtaagctcggttgctgaaaaattgggctatccaagcgtacaatatttcagcaacctgtttagaaaactggtaggggtatctccctgcgaatatagattgtcacaaaactaagtgctcttgacattctgcgatacccacattcctatatcctgcttactgagtgctgccgccatcaggtcggggaacttatcgggcgtacaagcaaaggtaggtacaccgatatttgccagaaattctgcatgatttttgtcataagaaggggcgccgtcatcattcagggcgggcagtacgataagttgcacgccactattcaccagtgatgcgaacttctttcgcatttctctcggatcgcccccttcatacaagtcggtcaccagtaccagtaccgtatcttgcggacgggtgattactccctggcaataggtcagggcgcgggcgatatccgtaccgccacccaactgtacaccgaagagtaagtctaccggatcttgcaagtcatcggtaaggtctaccacagccgtatcaaataccaccatccgcgtgttcactgcaggaatggaagccagtacagacccgaagattccggagtaaatgacggatgtccccattgaaccgctctggtccagacagaggatgatgtctttcatcgctttccgttttctgccgtaaccgatacggacttccgggatgatagtcttgtattctggttggtagtttttcaaattcttggtgatggtggtcttccagtctatctcgttataacgtggatttctccgccgtgcagaacggttgagtgctcccgtcacagcctgttgggtaggggcggagagctttcgcagtagttcgtccaccactttgcggactatctgccgtgccatttccttattcttttcaggaataacccggctgagtgacatcagtgtagctacaagatgcacatccggcactaccgtttcaagcatttccttttccgttaacagtgaggtgatattcagtcgtttgatggcatcgcgctgaatgacctgtaccacagtctgcggaaagaattcacggatatctcccagccagcggcttacctttggggcggatgatccgagtcctccgcggcggtcgctgtcatatacggcttctaatgactggtcgatgcgttgttcttccggtgtcagtgtgatacccgttccgtcggcttcgtttccgcccagtatcaggcgccaccttttcagatattcttcttccattgttttctctttacttcgtttcaattcctaataagcggtgaatcaagggaatcaccctcacagcttcctcttcattgtgtgaagttgctgaggctgttgcagcctgtatgccgcctgcaccgcccgccttggctttctcacccaacttccggcgttctgcgggactgaactcgctgaatgtgcgtttcagtatgggaagcagttccatgaaggtttctttttcctgcgaacatacccagttatttaccaggttccacaaattatcatccagcagcagaatggaaccggaagaacggaggaaaccctcgaaccagtaagccatatctgccggagtattaccgatggaagaataataactaagggtattctgtgcttcttcggctgaaatgtctcccttgtcgttcagcagtcttgtggcatagccggataacagcggatgtacattaacggatgtacgcacctggcggataaactccagccacatcctgttcagctccggatcattgagagtggaaactgcgtaatccgtagacaccagtttgttgagtatgtccgtagcggcctcctcgtctatattgatacaaacaagtactccacctgcaaggatacgggcaatcatagcttggagcatatcgcctacctttgagaaatccagattgcggacattgccgtagcggacgatatttaccagatcgggtactgcctccatcatctcgataatatcagtggaggcagccgagaggcggtcgagttgcatcgtcatggcttccactaagtccggtagattggcagggattacccggtcgagcagccgggtgagttccggaatatgccgtatctctttcgtctgtttgagcagaaacttctgcgttgcttcttccagtgtatttccccagatagccttttcgatgatgcttataatctgttccggtttgtggtagagtgtccatttttctttgaaagtacctttaccgtcagtaccgcccggaattgcccaatctatgtcgagcaggtgcaggcgatggaagaagatacttctatccagatcattcggtttacgaaggtcgagagtcagctctttgatttcggctgtaaatggaacacgcagccgtttttgagtcttttccacatctaccagcaagggaactttgggtacatcatcgggaacacgtcccagacggttactgatgataagttcttccttgattatctgtaaaaggatatcgtcgccaaagcccatgacggtggtgatggcttcattaaactcagccagtgaaggggctgggagattgcgtaaagcagccgtcacctgtgccagacgcacagtttcgatgacgtgggctacggagatatccatattcttcttgcggaaaagggaagcagcctgactgatccagagggtaccgtcgtcctgcggatgatgccaaagataatgataccagcccggagattctataccggctccgtatccgctgcggaaagcaagccggtcgtatgtccagggaatccaggtacattctatttttattttgggcagtcctttcagcagttcgttatcctcttttactttaggcatattttcgagggcgggcacatgccaggcaccacagaccacggcgatgcgttcgaagttttctttctgtgccgtgcggatcatcttacgcatccaggcttcgcggagctggtcacggggagaggtatgttcgggaagttcctcccgcaatgcggttacggcttctttcacagcctgaaatacatcggcactgtctttgcggtgctcaatggtagtttcccaccatgactccccgtctgcatatccggccgcttctgccagatagtcaaaaggatctctgtatacggtggggataatctcctcctgttgctcttcggttgtattatggggcttctgattttgcgccatcgaatgtaccagtggtaaatcgaagaagcgtaacggtacttcgttccgcagggcgtaaactatcgtttgccattccggagagaattcggcaaatggatagaacaccgcattttgtggctggtcgggttgataggcgagtaaggcgacgggtggttccatctgctcattcagtacgcatggaagcagagtctcggcttctgccggaccttccagcaagatgagatcgggctgaagctcttgcaggtattccagtacgttccggcatgaaccgggaccgtgatgccttattcctaataagtgaattgccattcttttaatcttttagttcgtatgatggagtgggaggtatcagatcatatcccttgatgcacggtagatatctttccatccgtcgcggttcttcactaccgtctccatgtattcctgccataccactttatcctgtaccgggtctttcaccactgctccaagaatgcccgaaacaaggtcttcggcatgtatctgtccgtctccgaaataacctgccatggccagaccgttatttactaccgagatagcctcggccgtacttaatgtaccactgggtgctttcaactttgtctttccatcattggtagctccctgtcgcagctcacggaaaatggttactacacgacggatttcttcaagtgccggtttctctgccggaagttgcatcaccttttcaaagctttccacgcggcggcgtacaatgtctatctcttcgtcaatcgtatccggtaaagggagaataacagtattgaaacggcgtttcaaggcgctcgacagatcattgactcctttgtcacggttgtttgctgttgcaatgatattgaaaccgcgtatcgcttgtacttctttattcaactccggaaccggaagtgttttctccgaaagaatcgtgatcagagtatcctgcacgtcagagccgatacgtgtcaactcctcgatacgtcctatcttaccttcctgcatagccttcataattggggtttgcaccagtgcaccttcactgggtccttctgccagtagtcgggcatagttccaaccgtagcggatggcttcttctcctgttccggcagtaccttgcactatcagtgtggagttgccggaaatggcagcagcaatatgctcgctcacccagcttttcgccgtaccgggaagtccgtatagcagcaatgcgcggtctgttaccagggtagctactgctatctccatcaggcggcggttacctatatatttaggtgaaacttcaaatccgttcttcagtttgccacccatcaggtaggtgactaccgattgcggagacatttcccaattttcgggaacagagtttgtttcattctttttcagttcgtgcagctcttctgcgaattgctgttcggcatgttgtctaagtaaggtactcatattgttttgtattatttattgtcattaaacaagctgtttattttttctttcattctcatatattctgctgtcagtcggcagaatttggcaatggcatggtcggcatcgtatgccactgcctgttgttccactttgggcaacatctccggaggaaagtatagcgacaggcgttctgccatctctttcggataatagtaataattgctatggaacaatctttgtaaagctcgtgtggagaattttattccccattgcgtcccgtccgcattataccagggttcgggaatataattgctcttgctgtctgtctggaagttgattccctcccgttgctccggtgtcagtaatcccatcagcgaggaggcgtaggcttcatttgcatcttctttcagggtttgatacgcccacagattgtcaccgaagttttctatcggctggcataagttgaagtaggaaccgaatggtggcttctttgccagttttgcggcggctttctccggtgaacagtcgtagaactctacccagaaactgagcggtacacgttcggcgagctggcggagcagaaactcttcatctttttctttcttgttggaactgacctcttccaagcccaatttcttcatctcaggtgtaaaggtgattttatcgtatgaccaacccagtaacatcttataatgaagttttccacgcaacaggtcacagtatgtttttaccagttccgagtcgggcagactgcataacaggcgacgggcggtttcttttacattactgcttcggtcggtagtgacaatctcttgcaggaagttttcatccgttttactcagattggtgcgcaggcattgtatcaattcgtcacggtgggcggcagattcatttttcagttcggtttgcagcaaggcaagtccctgtccggggttctcttttctcaggcgttgcagcatccgctttcgttcttcatgcgaggctgtttcccaagtttcgtttccggtatctccccagtccggtaattccatgtgggtaagcagccagcgtccacggttacctgttaaggaagaaagcagtgcttgctcttcgtgcttatcgggattattgcggtcgtaggcatgtgagattagcgttcgcagatagaatggcggaataagcttgttgcaccgggcagctttccggtaagcatataataaaagatgccggttctgttcattgactatctgaatcagcaggtcgccgatattccggtcgaaatagggcagactgtcatccggagcttcattcatggtgatagcttctccggcaggtaacggttccattccggcacggctgtaggcgaaagtcagggctgaaaactgatagaaagcatcttccgcatcttcactcttttcttgcagcagccggaagttttcttccagagtttccggtaaaccgttcggaatgaattctttggcagcggttcccaataaggctgcattaatgattggttcagttacgttcatctctccaaatataatagtcagattgataccacattgaatttagctcccagcaattggcgtctgccagaaagaaggcggcaaacggctttccacccgtgacggataggatgtctgttcgggtgatgtcttgcatctgcacaggcatcagttcgttgtttgcatcctgcacacagagctgtttcccttgaacagccagtcgcagattttctactaatacgggtacattttcggcaaatgggttctgttgcagggcttccctgtatcgggcggttgcttcttgcagattcgcacagaaatgcggggtaaccgcttcttcggataattcacattctttgaataaggctcgaagactgcctactcctttataataacagagttttccgtcgtaggtacttccgggaacaagattgaattccgccaaggttccgggagctgtgaaactgagatagatggcgaaacgattactccgacatccgtatagccagtaaatatcattattcagctcgtttatcttctgacttctcttatggagtaccagccactggtcggtaattgtttcacccgccagcacatcctcttttgcttgcggataacctatctgtgtgcggatttcctgttgccactcttccggttgcaggtccaggttccggtaactcttcatcaggaggtagagttttccgagttggtcggttaacttgtatttccaactttcctcgtagaagtttatttcctgaatgactttcaaccgattggcaagtccgggagcctgggcgtcgaccatacggcgggcaataccgtcgaaaagagtataagcccgttccggtatattgattaatccgttgcgtagcaggtctttcagccaaatctccagttcatcaataccgttcagcaccttttggtggcgcatagcctgacgtttggcttgtgctgcttcatctacaggcgtgtcgcttttggctttctgttccttcttttcggctttttcttcccgcttggaaagccaggaagtcacccattccggttcgttcgcttctttgaactgctcagcctgtgcggcatataaaaataagagtcccaatccatgtttgcatggaaacttccggctaggacaggaacatttgaatgctacgttttttgtatcgattacggtctggtatggagttttcccacttccttggcaatgcccccagatagcacggtcactgtgttccagcaacacccacttggctcttgtcgccaacccttttccggcttttacggaggctgcatccggggctaattgtatgatttgttcttctgttagatttaataacatgataatcttagtcagctattagtgtgtttttagattgcaagtataatgctttttttctgtttttcagatttttcgaagagaagagttttctgtttttaccggaaatcatttgatccgtattcttaaagccgggaaagattctgtaactttgcggcaacaggcatcacatacctgcgagtaatatataaaaccgacttgtatggattttgaaacttgcatagcctctcattcttcagttctgatggagggggcattgggagaacgattgaagcgtgagtatggtctcaccatcaatggcagtgtagctatggctgatttgatttatagtcaacaggggcggctggcattggaaactctttggcggagctatatggagattgctgaaaaatacaatctaccgttcttggctaccactccaaccagacgggccaataagcagcaagttattcaggccggatatgatgaggctattattgaggataatgtcaggttcctccgtaagataaaggagacatcaaatattgaaatgtatattggcggtctgatggggtgtaaaggagatgcttatacaggcgccggtgctctgaacattgaggaagctcacgactttcatcattggcaggcgcaactatttaaacttgcgaaagcagatttcttgtatgcaggaattatgcctgtgttggctgaggcaacgggtatggcgagggctatgtccgataccggaatcccctatatcattagttttaccattcaaaaagacgggaaactcattgatgggcataccatcgactatgctatccggtttattgacgataatgtatctcgcaaaccggtgtgctatatgacaaactgtgtacatccctgcatcgtctatgaagctcttgcgcacaacttcaaccaaaccgaggctgtccggacgcggtttatcggtattcaggccaatacttccgcattgtcttatagtgaactggacggttccgctgatttgcaatcttcttctcctgccgacttggctgaaggtatgatgaaattgaaatcagaatatgattttaggatatttggcggctgttgcggaacggatgatacacatatggaagaaatcgctaagtctatacgttgaagtttgtaatggaggattgaatcaataccattctttttcgtatatttgcctcttaacttttaaaataccacagttatgagaaaagtacaactattgttagtttgtttagtgctttcagtggctgcttctgctgctgataaggtagttaagttaccaaagcccaatttgagtcgtgccggtacggtaatgaaagcattgtctgaacgtcagtctacacgtgaatatgcttcgaaagcattgagccttgctgacttgtcggatttattgtgggctgctaacggaatcaatcgtccggagtctggaaagcggacagctccatcggctttgaataagcaggatgtagatgtatacgtgatattacccgaagggagctatgtgtacgatgcgaaaaatcatcagttaaatctggtttctgaaggagatcaccgcgatgctgttgcaggtggtcagacttttgtaaaagcggctccggtatctttggtactggtcagtgatgtttctctctttggcgatgctcagaaaccacaaaatcaggttgttggagctatggatgttggtatcgtttcgcagaatatctctttattctgtgctaatgctaaattggctacagtgccacgaggttcgatggatgccactcagttgaagaaagtattaaaactgaaagatagtcagattcctatgctgaatcatcctgtagggtactttaaatgatagaataagaaatgagggtgtgtcggaactctcataaacttaaaatccccctcgttacaactatctgtggcgagggggattttaagtttgtttatttggcatcttcaataatagaacagatactaacccggttccagtctggttctgtgaacatgtcacccactccctgaccttcggcagtaatacgtgacgggctgattttatacttattgaccaggattgtctttacggcttcggcacgcgctttagctattcttgcattgacttcggcactaccttccggtgaagcgtagcctttaatcaccactgttgtatttgcgtatttcttcatgtaagaagccacacgttccacatttggcaactgagaggcatcgactgtagatctaccttgtctgaaagtaatgatggattccggaatacggctggtttccactaccgtctcaacagggattacccggttctgtaagttgtttacttcttgttgcagtgcgctgatcttctgtgcgtcgacattgatctgaccgttcttctcattcacttgtgagcgaagattattgatagaattgttcaggtcgctaatctcggccggatcatagagtttagccaaggtaaagtgatggcttccgttgctaccaccaaagtggtaagctacacctgctgttagttcaaaggcggcattgtttacattgaatcggctacggttgtggtcgccttgcatatcatataccaatgccggtttgactcctatcgtccaggctttagcttctccgagattgaagttgaaattcattccgaaacggctggaccaggagttcacatctccagggccgtccatgtagtagtgcagccatcccgcaccggctacggcctctacttcgaatatgcgcggagtacctgtatagcctgcgaacaggttcatcaggttgactttacccaataagctaaggtctgaagcatcaaaagctgtcttactgttcgaggtgtttatatatcccatgccttgaactcccagtccgaaaacgggggtaagttgcttcgtaaactcaattcccaaagccgggcgggcattcttgaagaaagcgctgtggcttacaggagttataataccggtttttagttctatagaccaattgtctgtgaatttgctgccttgtacggtagtctgggcatttgcagccaatgctgctaaaacaaatgctgctaaaataattgattttttcataattgaaatgcattaatagttgatacaataaaatataacatgccctgaagtagtttatttgtttgctcttttcaggaataaagcgggagggttaggttgcagatttcttgtttgctttgatctttgttaagtttaaagttagtttaatcatataatctactctttctcgaatcccgttcattaacgtaacagcgattctttctttcaaaatttaattttcttcttcataattcattattttaaattcataattaaggttgctgttcatttgtaacaacataatctttgaaacatggttcgatgtatgaaagggtaattaacaataatttagtgttgctcaagatcaataaaaagttggctcgggttactctcactaccctcactttttaaatagcttattgataattagaatattaagtgtaggtgagagtaaaaaaccggcgtgagagtaaaccgcttactctcacgccggatttttacatttctacatcataacttcttctgttataccgtaataccccacgtttggcgcatatatcggttggttctgtaatccgatgttttttagctttccttccccgcgtaagcggcggatatgccccattgcggtcgatttcatcatgccacataccctttggaagtcacttcttgtcatcatgtggtgctgactgaagtagatggttagtcggttgtctatttcttcgtccgataatttgttggagtgtccattgtgttttatattcttcagtttcacatttccgatttcactcctcagatcctgatccgcccggaatttgatgcctttcagccttactttcgtattcttccgttttgtatcttctttgatttcttccgtgcaggtcagggtagggtggaagtaaccgataccatccagatgtacctgcctgccttccgccagttcttcacccattgcatgagacagggcgtcgagcacggccgatacatcagtttccgtcagtgaacaacgttcctggattttgcgtcgcaacctgtcggttcctgtttttccgttcagtgtgatgcgtgcatgcagttttgtttcttcttgtgactggttgggagccaccgggttttcgtaccattcaaataagattgccatagttgcttgttttaattataaggtattaatttgttttacattagggactattctgtttcctcctaaggaacatcccgtttacccttaggaatgattgggtattaaccttggtcaacaggcttgtcaacgttggttgctcggcttgttgacctccattgcacggcctgttgaccaaggttaacacccaataggacttactacaaagatacaaaataagcagggctaagtcaagtgattccctgtttatttctcaattattattgaagcttttactgcaaaatgtatgagctgaacttttttgaaataaatgcagaataatatgcttaaatacttgactttcgctttttggagcagtatctttgtaactctttaaaggaattatactatataaataaaattcaaaacagataatgatatgaaaatcacttcaataagacatgacaaagatgcaggcagagagatgatgaccgtttatgatgccgacgtgctgatggagaagatgaaaacggaaaccagagacgggtatgtgacggggttacggactgtcatccctcagttggaaggtactgaatccgcattctctcatattgacaaacttccacgtgtctatcctgccgtggagtgcgcccggactaaagacggagggcgaaggatgaaacgatacaatggtctggttcagcttgaagtgaagaagctggctgggctggcggaggctgaactggtgaaacgtcaggcgatgctgcttcctcagacgtttgccgctttttgcggttccagcggaaagagtgtgaaaatatgggtgtgtttcgccttaccggatggaaacttgccgaagcgtgaacaggaagccgcattgtttcatgcccatgcctatcgcctggcggtgagttgctatcagccgttgttcccgtttcccattaccttgaaagagccctcactgatgcaaagctgccggatgacactcgatgaacatcccggatacaatcctcatgcggtacctttctgtctggagcagccattctccatgcccggagaacagaccttccggcaacggcagttggctgagaaaaatccgttactgaggctggaaccgggttttgaaacatcgcagaccttcaccatgctttttgaaaccgccctcgataaggcgctccaggatatggagaactggcgacggggaaataatctccaaccgttgcttgtccgccttgcggagtattgctacaaggcgggcataccggaagaggaagttgtgaggcagacgattattcattattatgcacaggcggagcagcaaacggtacgtgctatggttcataatatttaccaagagtctaagggctttggctctaaaactattttgactccggagcaggataccgctctgcgcctggaagagtttatggaacggcgctatgagtttcgttataacacggtgttgaacgatctggaataccgtcagcggaattccattcatttctatttcagaccggtggatcggagggtacgcaatacggtggcgattaatgccctgaaagaggggattcgtgcctgggaccgtgacgtggagcgttatctgacatcagagtatgtgtctttgtacaatcctgttgaagaatacctttgcagtgtggggcgttgggacggaaaagaccgcatccgggcgcttgccaatcttgtgccatgcaataatccgcattggcgggagttgttttatcgctggtttctcagtatggtggcccactggcgtgggctcgaccgccaacatggaaacagtacgtcgccattgctggttggggcacaggggtatcgtaaatctacctattgtcgcattattttgccgcctgaactgcgtttcggatatacggatagtcttgattttaagagcagacaggatgcggagcgttatctggggcgttttctgctggtgaacctggatgagtttgatcagattagctccaaccagcagggttttctgaaacatcttttgcagaaacctgtggcaaatttgcggaaaccttacggttctaccattcaggaagtgcgccgttatgcctcgtttattggtaccagtaatcagatggacctgcttaccgatcctagcggcagccgccgttttatctgtatcgaagtgactgcacctattgatacgaatgtcaccatcaactacaagcaattgtatgctcaggccatggatgccatttataaaggtgagcgctactggttgaatgatgaggacgaagctatcctgaaagagaccaaccgggattttgaacaggtcagtccgctcgaacagcttttccactgctatttccgggtgacggaagaagaacgggaaggggaatggctgaccgcaatggagatattcaattatctacagcagaaaacccgcgataaactgtcggtcagcaaaatagggcacttcggccgttcgctgaagaaattggatatcccttgcaagaagacgaatagggggacggtgtatcatttagtgagacttggataatggctgaaacaattcctcaattctacaagagaatacaacgttgcgatccgaaactggatgcaacttattctaaagggaaagaatatttcaatatcttctcccgccggtgcaatttcggtactgtgcaattcagctatcgggatttctataaagtaactttaatcatgggtattgggaaattatattatgctgataaatggattctggtagatcgtccggcgctgctgttttccaatcctcttgtgccttatgcttgggagtctgtcagtgaagagcagaggggtatgttttgcatttttaatgagcagtttgtgcaatccgaagagaagaacggctctttggcgaatacacctttatttaaactgacgggtgacaaagtcttcttcctggatgaatctcaactgatgaaagtacaaaatatatatgctcagatgcaggaagagatacaatccggttacacaggtacacttgatgtgttgcgttgttatcttcatttactgatacatacggccatgaggatgcaggatgctaatcagtatgaatcgcatccgaatgcttcactgcgtattgtagaattgtttatggagttactggaaaggcaatttccgatagattatccccgtgctgcattagttctgcgtacgccgactgattatgccaatcggttgtctgtgcatgtgaaccatctgaataaggttattaaagaaacgacaggaaaaacgacctcagtacttattgcagaaagaatcgtaaaagaagctgttcaatatctgcaacatagcaatctttctatttcagaaatggcatttggactgggctttgagtctgtttcctactttagtaagttctttcgtaaacatacaggtaagtcgccgactgaagtcagggggaaggtaactatttgatttgtacaaaggatgatttgaatagtactcatccgtccgtacgctaacacctaactttgcaccgaaatgaaatattaaaattatgaagtacagaaaattaggtaaaacagatgtgcaactttccgctatcggactgggttgtatgggaatgagtgctgcgtatggagtggcggacgaaaaagagagtatcgcaacgttgcaccgtgccttggaattgggcataaacttttgggatacggctgatgtgtatggtaatggagccaatgaggaactgctttcgaagatggtaagtgaaaaaagagaccggatttttattgctacaaagttcggctttcgtttacgtaataatcaaggcagtgtatttggtggtggtgaaagttatgtggacggttctccccggtatattaaacaagcggtagaaaacagcctgaggcgattgaaaatagaaaccattgatttgtattatgctcatcggatagatcctgctgttccggttgaagagactgtggaagcaatggctgaactggtgcgcgaaggtaaagtccgatatttaggtttaagtgagtgttcgcccgaatccttgcgaagagcttgcgctgtgtatcctattgccgctgtagagagtgaatattctctgctgacccgcgatgtggagaaagaaattctgccactgaccaaggaactgggagttacgttagttcctttctcaccattgggtagggggctggttgccaatgcaatcagtgtagagacattgggtgaaaatgactttcgcaggcatttgccgagatacactggtgagcattgggtaaataaccaatgtctggctactgatttggccggtatggctgcggagaaaggtgtcacttctgcccaacttgcattaagctggatactggcacaaagtgagaatatcattccgataccgggtactaagcggatgaaatatttggaagagaacgttcgggcggttgatgtggatttgtcagttcaggatatggcggatatagaaaagctgttgcaaaagtatcccaatgttggcaacagatataatgagcatgaatttaagtttgtaaataaataaattttagtaaaaactcaatgtgtttctaatgtgttataggatcaataatactagctcaaaaacacttgattgaaaaagatttgggaatgcggcgaaaaatgagtatttttgcggttaattaagcagagctgtttttaagggcttaacttgattatagatagaaataataaagaaaagaataatagtaaaattctttataaatatgggtgtggatcaaagcaaacatcaactgatagaagcgttttaccatcgtttggttgagtcatatggctatctgccagaccaattggattttaacgtagagatatcagcatcatctgttgcagatattgcaatttggcgtagtgctgacgagaaaaagttggggcttactcccaatatttatgtccttgtagtgtgtaaagcagagcatataaagataaaagcagaggattattccgaacagtttaaacaagctgttttaaatgatatggctttttatgttgctcataatcttaaagaaacgaaagttttttatattgataaaaatgctcggccactcagaattgaacgaatcagtgattttcctactgcaaccgatatagcttcggagcagaatttagctctgtttgttaacaaagtgcgcggctattccaaagataattttttaaaggttcttactcgttgccataatataatacgaaatgtcgataagctttcgccggaggctgcctttgatgagattagcaagatactcttcatcaagatgctttatgaacgggatgctaaagatgaattagtctatagtaaggaaaagtttctaaaagatgaaatgtcttatgggggaactggggattacattcaggttctttttaatcaagtgaaagaaacgtatgctgctgatggtttatttgaaattgaggataaaatacgaatccgtcgtgatagtttcttgctgatattagaagaattaggtaatgtggagctatatgatacttcagacgacataaaaggtatagctttcgaactgtttcttggaaagacttttcgaggtgaattaggccaattcttcactcctcgtaccatagtaaattatatggtggaggtactcaatgtaaaggaaggtgatcgtgtttgcgacccttgctgcggcagtggaggttttttaattcagacttttgagcacgtgcaaaatctgattgatcaagatattcatcaacaaatcaacactctgatggacgatgtgacaatttcagagagtgaaagaaaacagagaataaatgatttactacgtgaatgtgataaaacggttaatggtagtcgataccacaagctttgtcataattacttttttggtgtagatgccaacgcgcgtatggctcgtacttcgaagatgaatatgattatgcacggtgatggtcatgtgggggtatatttacatgatggtctattaaacgttggtggtgtttatgatagcagttttgatatagttctcattaatccaccttttggtgctcatgtggagaaggatatgcgtatcactgattctgatgtgccaacggaaaaagagaaagaattatatacaaaacttttcggttcggaatatttagagcgtgtttataaccctatgaaagaatacgctgcaaaagtgtataaagacaagacaaagggtaagcgtattttggagttgtacagtataaaaaacaacaatacggagatactgttcatggagcgttgtatcaacttacttaagcccggaaagtgtgccggtattgtactcccggaaggggtattggataatacggctctggagggtgtacgaaagtttattgaaaagcaagctcgtattctaaatattacttctattcctgctgatgtgttcctctcgtcaggtgccaatatcaaaccaagtcttatcttcattcagaaataccatgagaacgaaatcccggaaaaggattatatgctgacggtaacaaaagtcaccgatgctggtatctcatctacaggtctaccatcacagaaccaagaattgccaatagccgcaaaagaggtatgtggctttttattgggtacccctatgcaggaaatgatctatacgagagctatccgtcggtcagaattagtaaattggagtgtaaaacaaatttttgatataacgtatgcagagttcaatccgcagtatgagacaacaaaaataggtaatctgctcacaatgagtaaaaacgtgatagttatagaaccggatgtggaatacactcgactgaccgttaaattatataataaagggataagcgtgcgagacaaagtaaagggtgttgatatcggtacaaaacgacaaactcgtgttacaaaaggacaatttgtaatatcaaaaatagatggaaaaagtgctgcctacggaatagtagatgctatgtttgatggtgctatcgttacacctgacttcatggtgtatgacattaataggagtaaagtactaccagaatatttggagttagtactgcaaaatgaggcaatactaaaccaatttgcgacttcaagcagcggtacgacaggcagacgacgattatctcaaagggtatttgaagatacacggattgcgcttccttctttagaggaacagcacaatcttgttgctgagattattcaaatacgaaagtcgcagaaagttttagaaaatcgcatgaaagcaaatgtagactctttcaatcgtaaaatattcaataaacatgaaactactttctttaaagataacttctgattttcgtaatcttaaaggtgtcaatctgcagtttgatcctgcaaatgatacatacgtcattattggtaataatgggacggggaaaacaaatattttagaggcacttagtagtgtattctctgttctgcttgcccattcacaagattttctattcagttttgttttaagatacaatattggggatgttgagtattgggtgagacataaaatagatacaaagactacagaatataaaaagaataatgaagtagtgaatgaggcagggatgacatatcccaaccgtatagtttgcaactacagcggtgaggatacccgcatgtggaataactattacaaaaagccaaatgaagactacatgaacagtgtgcgtactgctgctgctcctgatgttttgtctatggtttacatagacaaaaccatgtggaaatatgtgttgttatgtatgttgacaacaagaaatatgaatgttgcatttgaccggtttttaaaagaaaaactacatatagcttccgatggaataaatactgtagaaatgaaattagatgaagctaaattgaggcggtggcgtgcggaaaatcagattacactttttctaaatcagctgcgacatagactgggaagcaacgaggtcttagcctcaagtaatgtagaagactttaacccgaatgaagacgatgcgcgtgaattattcaacaaatttattggagctagtcaggttatagacagcttgaatatatattataaccaaggtattgaatctgcgttcctcagcgaaggcgaaaaaaaaatgatggttatacttttcatattggaggctattgcggatgagcgaactcttgttttgatggacgaacctgatagtcatctccatatatcaagaaaagcggagctgaatgaaatgtttcatcagatggagcatcgtagcaacataataacctcccactcaccaacattaaccgcttcgtttgagaaaagtgcaaaggagtcaatcattatgcttgacagaaatgctgatggaacaataaaagtaattgatagaggtattgtgaatttggttgagaaattgacagaaggtatttggacatcgcagaagcagaatctattcttagcctcacatgacgacattcttattgttgaaggacctacagatgaaacttttatctcagcggcactgaagtgttttcagaaacaaggtaaatatgtagacttagcatttgaatatataccatgtggcggtgcatctaatgtcaaggccttcgctcagaagttcactcctaaagaagggcagactgttattgcattcttcgatggggataaagctggtgagagcagtatgaataatgttattccatgtacactgagtggaaaaactcaatgggacgttggaaattttggtaaggcccgcaagaatggcaacacatggttctcgttctatccaccctatgctcgcagaagaaataaagaacacttcaatgtagaggactatttcacttgtaaattgttccgtaagtatattttttcatttagttcactcgatactgtaaaagggaaagaaggtcttaaaagtattttggataaagattgtaaaaaagggaatatagatagtactttttacgaaaaattcagcactctttttgatcacataaaagcaattaaggatgcggaaaaggctggacagataatattgtaacaacaccatcatcatatagtcttttctgttaaacgacactctaagatgaaaaactcaattccccggtatacattctataagaataagtatggaagtgaacttctgatagatgtggtagaactgaaatatgtaaagaggttcctggctgaaagcgccgtacacacgttgacttattatgacattacttttgtaacagaaggggaagggagtttttctatcgataaccggacctatcaggctgttcccggtgatgttttcttttccaaaccgggtgaggtgcggaattgggataccggtcggattgtaaatgggtatgctctgatttttgaagatgacttcttgtcctctttctttaaagatcctctgtttgtgcagcatcttccattcttcaagatggaaaaaactgcatcaggattgcacttgcccgatgaactatataagcgcatgcttcagctcttgcatgatattaaggcagaaattgaccaatacagacaggacgatgtacatgtgttgagggcatatctttacgaggcgctgatgttactgaaccgggcttatcagaatatgatttcgatggaagaggggaacaaagaagcgggtggtacacatatcagtaaatttattgaattagtcggggcagatatgagagaacaccattctgtccggcattatgcagacaagctttgcatcactcccaattacctgaatgagattgtaaattcagctatgggaataagcgcaaagcaatacatccggaataaggttatggaggaggcaaaaaggctgcttgcttataccgattttcctgtttcggaaatagcgtttgaacttcatttctctactgtttcttattttgtgcgctgctttcgccaatgtacaggcgagactcctttggcttatcggagcatacataaaccgtgaaaagtactatttctgccttgttttttattatgccggttttctgtagtgtccttatctttgtctcattcaataaccattaaaataataataaaatgagagatgtggaaaaaacaatcgggaatatgattgataaattgaaaatcgctttcctgggttcggtggatgaagaaggcttcccaaatgtaaaggctatgttgcaaccccggaagcgggaagggataaagacgatttatctgtcgacaaatacttcatcgatgcgtgttgcacaattccgggaaaacaatcgtgcctgtatgtatttctgtgattcgaggttttatagaggagcaatgctgcgtggcacggtagaggtgttgacggacagtgccagtaaagaaatgatatgggaggacggggataccatgtattataaagaaggtgttactgatcccgactattgtgtactgaagtttacggcaacttccggaagattttacagtaactttaaatcggagaactttgttgtggtgtaattacgtattgcttgggagatatcagatttcttccaatgcataatactggtagtcgcggagaacggtctggagaaatttctcctgattgttctcacggggtgtcacagaaagaagttcctgaactttttttgtcagttgtgcaatgtatcgtatgcggtcttttttcccggattgtaaggttcgggtaattacgtttatctgttccagcgataagtcagcggcttgcggataagtaggctggtagttctgggtcagataatcaaattcgtcaaggctgacatgtatcttacggtagtttttctctttgataaccatggtacccgcggcaaggtctcccatccgttgactgtttttggttaatagagcgactaacagtccgagacctccggtaatcggaccatcgatagggaagaggagccaccggagtaagtaggaacttatgctcggaacggaaccgtcagcttttacaacacggatattcatcagtcgtttcccaaggctttgtccgtaattgaacatctcacatagaaaagaatagaacagcaccggtaaatagattaccgccaggaagaaaatcatagtgaaatccgaaggcaggcggagcttggataataccgttacagttgaaaatatatagaatccaatcagaacgtaatcaataatcaaagcaatgattcgctcgccaatactggcgggcgtctggctgatgcggacaaattgccctgtaagaatagtagattctgccattgctaattgaatatttctaagtatttcgttgcaaatatatcattattctcttacttttgttattgatttcagacaaaactcattcgaagtcagtaaaaatatgaaagaagtaacgtttattcgtcggaatatagaaaaatggaaagaagccgaaggcgtggtggagcaagccacaaactcgtctcctgaccggcttgccgatgtgtatacggatcttactgccgatctggcatttgcgcagacgcatttcccgacttcccgtattactatttatctgaataatctcgcttctgctttacacaataaaatttatcggaacaagcgtgagaaatggtcgagagtcatcactttctggacgaaggaaatccctcaggttatgcacgatgcacgccgggaattgctggtttcattcctgatttttatagtgagtgccttggtcggtgttatatccgctgccgctgatccggattttgtccgcctgattatggggaattcttatgtagacatgacgttggacaatattgcgaatggcgaacccatggcggtgtacaatagctcatctgaggttccgatgtttttgggaatcacgttgaataatattatggtttctttcaactgcttcgcaatggggatactgaccagttttggtacaggttatatgcttttcagtaatggagtcatgttgggagctttccaaacattcttttatcagcacggtttgctttgggattctatgcttgccatctggttgcatggaacgctcgaaatctgggctatcattgtagccggcgctgccggtttggctttaggtaacggatggcttttccccggaacttattcaagactggaatcttttaaaagaggagcgaaaagaggattgaaaattgtggtggggacagtccctgtgtttattatggcaggttttattgaaggttttctcacacgccatacccaactgccggatatgttgagactcggcctgatccttacatccctgacatttattttattctactatatttatttacctaatagaaaacgacatggaatcacaaaagcctaaaatcgcaatgtatgtaaaacgtaatttcggtgagaaactgagtgcgtcttttgattttataaaagaaaactggaagctgatgctgaaatttactacgtatctgcttttaccgatttgtcttattcaagcgctgagtttgaacggactgatgggatatatagcggtgctgactgatttatcaggtggtggcgggctttctgatgcatctctaatgatgtcattcttttcttattatagtctgtatatgttcgtttttttgataggaacaattgcgctgacttctttgatttatgcattgatccgaacctacaatgaacgtgacgagcgtctgcaaggcgtaactttggggatgttgagaccgatgttgctccgtaatgtgaaaagattggttgtgatgactcttttcggattgctcttaatggtacttttaggggtgattatgggattcatggcggcattgctttggcccgtcctgttcttggtgattccgtttgtgattattttggctgtaccatttgctctttgggcaccgatttatctctttgaggatatctccgttatggaatctttgaagaagacttttcgtctgggttttgctacgtggggaggtattttcctgatttcccttattatggggttgattgccggtatcttgcagggagtgacgatgatgccctggtatataggcactattgtgaaatccatatttgcaatgagtagtggaggcagtgaggctacggtatcggtaggatataatttcatgctttatctgttggccattgtccaggcattcggtgcttatcttgctatgatcttttcacttgtaggtctggcgtatcagtacgggcatgcttcggaaaaggtggacaatatcatggtggaaagtgatatcgataattttgataagctctaaaaacagaattgtataaatgataacttctccggctgatacattggtatgtgatactacccagcttgccgtgtggcaatctgatccggcgtatgactatggccgtgagttgatggctcctgatattaatgtgtttgaatggttcaacaggtggtttggaaagattctgcaaaaaatattcggcagtcattttgctgaggaatactcggagcttattctgataggcattgctatccttcttttaattttgataatctggttcgtttacaagaagcgaccggagttattcatgatttcccgtaaaaatgctttgccttatgcagtggaagaagacactatttatggagttgactttgcgcgaggtattgctgacgcgctttcgcgtagtgattaccgggaagcggtacgattgctgtatttgcagacgttgaaacaactcagtgatgaaaagcgtatagactggcagctctacaaaacgcctacacaatatgtttatgaagtgcggatgcccgctttccgacaattgaccaatcatttcctgcgagtgcgttatggaaattttgaagctacggaagcattgtttcatgtcatgcggtctttgcaggaagaggtgaagaaaggaggcgctgtatgagaggaagccattggtttattatctgtatcgtatcttttctggtcctgatgtttgcaatagaatgtcggttgccgaagaaattcgtatggactcctacttttagccactatgataaacagcctttcggatgtgctgtttttgatagtttactctctgcttcattgccgatgagatattcggtatccgggaaaaccttttatcagttggagcaggaagatacggtttcccgccgggcgatattggttgttaacaatcatctggctctgacagatgtagatgtgaatgcattgttgaaaggggcggagcggggaaataaaataatgttggtgagtaattcatttacaggaaacttacgggatacactggggtttgagagtagctactcttattttaatccgattgtgttgagaaagtatgccgcttcattgttgtcgaaggatagtttgcattgggtaggagattctactgtctatccccggcggatctttcgtttttatccgcaattgtgttcctcttatttctggcaggactcgctctctgtgaaagtgttagcggagaaatctatttcatcagatgaattcagatatgactttggagtgaagtttgattcattgcaggtggataccctttgcaatgttccggttgccatgtcttgttcgtggggaaaaggggaaattattttggtttctactccgctgctttttaccaattatggtgtactggacggaaagaatgcagcttatattttccgtctgctgtctcagataggagagtttccgataatacgcacagagggatatctggaggaagctgcacaggtacagatgtctcctttccgctattttatttctcaacgaccgcttcgctgggctttgtatctgacaatgattgccattctgctctttatgacatttactgcgcgaagaagacaacgtgtgatacctgtgattcatgaaccggaaaataaatccatggagtttacggaactgatcggtacgctttattttcagaagaaagaccatgccgacttggttcataaaaagtatatttactttgccgaagagttgagaagagaaatccaggtggatgtggaagacgtggcggatgatgaacgctctttcgataggattgctcagaagaccggcatgagtgcggaagaaatcggtaagtttatccgtacggtcagaccggtgatttatggagggcaaacgataactgcggagcaaatgaagcagtttattgataaaatgaatgaaataatcgatcatatataaagaagaagtttatggaagagaatacagaaaaacgggtggatctaactctcttttccgagaagatacaagagttgaaagaccggattgcttccgtcattgtagggcaggaacagatggtggacttggtgctgaccgctgtgttggcaaatgggcatgtgctgatagaaggagtgccgggagtggcgaaaacattgttggcacgcctggttgcccgtctggttgacgcagatttcagccgcatccagtttactccggatttgatgccgagtgatgtgctgggtacaacggtattcaacatgaaaaccaatgattttgatttccatcgcggtccgatctttgctgatattgtactggtagatgaaataaatcgtgctcctgccaaaacacaggctgccttgttcgaagttatggaagagcgtcaggtcagcattgacggagcgacctatccgatgggagaactttatacgattctggctacacagaatccggtggagcaggaggggacttataaattgcccgaagcacaacttgaccgttttctgatgaagctgacgatggattatccctcattggatgaagaagtgaatattctggagcgtcaccatacgaatgctgcatttgtgaagctggaggacattaccccggctattactaaagaggagcttttgtcgcttcgtaatctgatgaagcaggtgtttatagaccgtacattgcttcagtacatcgccttgattgtacagcagacgcgtacaagtaaagctgtatatctgggggcttctccacgtgcgtccgtggccatgttgcagacttcgaaagcctatgcgcttttgcagggacgtgattttgtgacaccggaggatatcaagtttgtggctccatacgtacttcagcatcgtctcatcctgacggcggaagctgaaatggagggctactcaccagtgaaagtaacgcaacgcctgattgataaggtagaagttccgaaatgattctgacccgtcggttttatatggttctcatcctgattatcctgttgatgggtagtgggtatgcttttgctccgttgtttaccatcgggcaggggttgctttttctcctcttgctgtcggtgctggcagacggatatatgctttaccggattcgtgggattcgggcattccgtcaatgctccgctcgtttttccaatggggacgaaaatgcggtgaatcttcgggtggaaagctgctatccgtatcccgtctttgcggaggttatcgatgaagtacctttcatttttcagcagagaaatattagttttcgggtgcagcttcaggcgaatgaaggaaaacaaatctgttatcagttacgtccgacaagccggggaatttatggtttcggacagattcgcgtattcgtaaccggtcggataggtttgctctcccggcgttatacatgcggagaggagcaggatattaaagtgtatccttcttatctgatgctgcatcgctatgaattgctggcaatgagcgataatctgacggagctgggaatcaagcgtattcgtcgtgtggggcatcatactgagtttgaacagataaaagagtacgtcaagggggatgactaccgtacaatcaactggaaagccagtgcccgtcggcatgaacttatggtgaatgtatatcaggatgaacgttcacagcagatttacagtgtgatagacaagggaagggttatgcagcaggcatttcgcggaatgactttactggattatgcaatcaatgcttccttagttctttcgtacgttgccatgcggaaagaggacaaggcagggatcgtgactttcaatgaacatttcgattcgtttgttccggcctcaaaggctcccggtcagatgcaaactctgcttgagaatctctatagccagcagactacctttggtgaaacggacttttcctctctctgcgtgcatttcaataaacatgtcagtaaacgcagtttcttggttttatataccaacttctccagtatgggaagtatgaatcgccaattggcttatttgcagcaactgaatcgtcagcatcgcttgcttgttgttttctttgaagatgctgatatgaaaacgtatattgcctctcctgcgaaggatacggagggatattaccgccatgtcattgcagagaagtttgcttttgagaagcgtctgattgtatctacactgaaacagaatggtatctattcgttattgactacacctgaaaatctctcgattgatgtgataaacaagtatttggagatgaaatcaagacaattactctgaaaaacaggagcaaatcataaaagatgcctattttggataatcatatccggaataggcatcgtatatttgtgccatgaatcaaacagtggacaaacagtactgccaaagttgtgggatgcccctccgtttcgatgtggaagagtatttaggtaccaatgccgatcactcctgcagtgacgagtattgttactattgtctgaaagatgggaactatacggtggatgtctctatgaatgaaatggtggatatctgggtgaaatacacggataagtacaattggtattcgggaaccgactatactccacaagaattaaaaaccttattgaacaagcgtcttcccaccctgaaacgctggcgacagaaagagatgacacaatatgttcactatgaagctgtcaatggggttcggacttatattgatcaaaatctctttcatgagcttgatcccgaacagttggctgaaatggttcacctttcattcttccatttccgaaaggttttcagaaatgttaccggtgagaatatcggtacatatattcaacgtttacggctggaatatattgcccatctgcttatcgctaccggacagagtattgaagagataggtatgcagactaattatcagacaaagtttagtctggcaaaggcttttaagaagcatttcggcatttcaatgtcagcttatcgcgaaaagtataaatctgtcaatgcgaaacaagaaccggatagtatgcccgaggctaaaattaaacgtatcaatactttgaaagccgtttgcatagaagtaggtgatacttttcgtgataaatatgcttacactacaatctggaagcaattactgcattataaagcagttcatttgcagaatggtcccggtaatcgttttgtaagtataagtcaggataatccttgggttacaccgatggaacaacggcggttctatatcggggttcttgttgaagggagtgccaagtccgaagggaaattattacttcgggaaattcccggagggatgtacgctgttttcaggtataaaggcagttattctgatttatcagaattttataagacgatctataatcaatggtttccttacagtatgtatcatcagaaacgtccgttgacgtttgaggtgtatcttaatgcaccggatgaaacgccggttgaggaattgctgacggagatttatattcctattgataaataactaaatgatataagagtatgttagaattgccagaagtacttacactgagtaagcaagccaatgatgttttaagcggtaaaacgattacgcaagtgttcaatgctaccaagcctcataagttcacattctatagtggcgatccactggagtatgggaagttgctcgtcggaaaaacggttctgtcgtctaagggatatggaatgtttgttgatttttacctgtcgggcaatgtgataatgaatatcggtgatggggtgagcgcacgttactataatccgggtgataaagttcctgccaattaccagttgctgctgacttttgaagatgaatcgtttcttgtattcacggttgccatgtatggttttatcagtgcctatcccgatggcgttatcgacaataaatattatacgataagtcgtgaaagtatttctccgttgagtgatgcttatacggaagcggaatttgagaaattatttgcttcagccaaaaagacattgacggctaaagctctgctggctaccgaacaacgtattccgggtgtaggcaatggggtaacgcaggatattctgttcaatgccgggattcatccgaaacaaaaagtgcttgacttgtcggatggacagaaaggggcacttttcaaatctctgaaggataccttaatggctatgacttccggaagagggcgtgatacccagactgatctttatggaaatgagggagggtataaaacgattctttcttccagaacatggaaaaatccctgtccgcgctgtggcagtgtgattgtgaaagaagcctatcttggagggtcggtttactattgtcctgagtgtcagaaaataaggaaaatataataacaacttaaattatagttatggcgaaaggaacaggtcacaagggtggtgttcttttttctcttccgataatttgcaggagtaaaaagtctgcctatctttgtggcgatataaaaaaatgttggatgtttaaagttaagaaggattcggtaagtaaataactgtgggcatcatgagtaacgaaaataaatctattcacgaattcgattttagtttaatctgcgaatacttttcaagtgtagaacgtcagggaccgggaagtgctgaaacaacaatcaaggctcttagctttgttgaggggcttacggataaatctctgattgctgatctgggttatggcacaggtggccaaacgattacgctggcgcaacatactccggggcaaattacaggcattgatttgtttcctgattttatcaaccaattcaatagtaatgccgagcactttaacctgcaggatagagtgaaaggtattattggatcaatggatgaactcccgttccggaatgaagaattagatcttatctggtcggaaggagccatctataatattggttttgaatacgggttgaatctatggcgttcgtttttgaagaaaggtggttatattgccgtatcagaggtatcatggttcactgacgaacgtccggctgagatcaatgatttctggatggatgcttatcctgaaataaatacgattcccaataagctggcacagatgcagaaggccggatatattcctgtagcctgtttctgtataccggaaaattgctggatcgagcatttctatatgccacaggttgaagcccaagaaaactttctacgaaaatatgcgggtaaccaggcggctgaagaactgattgccaatcagcgccatgagcaacaattatactataagtataaagacttttatggttatgtattctatatcggaaagaaaatctaaatgaagaaaagaccgtatcagaatggatgataatcctttgttgatacggcctcttttatgggttgtaaaactctaattcatccactgctttccatccaaagataccgttttttattgtaacatgcagtatacatcccatagctacttgtgcatttatggggacatggaagtaaagacagtcgtcaggattatcctgatcgatagctttcagaattctacattcaggcaatatggtccgataacgagccaatttattgggctttaaaaaacggatttctgttactctgtattctttgcgtacgggagtcctgcttgccaaccaatgattcatattcagtaacagattgacacccataccgtgaaaaagcattcctataacaatgccaaaggcgatggttttcaggtaatatccgacttttgtgtatttatctgccagtagtatgccaataacaatgacaaaaatggcggtgaaaagcatcacgaatgccatgagtgggcgataactgataccccgaaatgctgtttgctggagcaatacagtactgggagtggccagataacccactccgacaagtattgccaggatcacaattactatcagccagacatatatagattgcctgcgctctttctttttttcccggatttgtccggtggttgttattcttcgatatctcattctgttgacgaaggtacgcttttatatcttcatatagcctatctcctttaaaattctattcaagcttcttctgagaaaagaaataaaaggctttgtttataataagcttaaagagattttgtatatctttgcataattaaaaaactagacttaaagaaaacattatgaagacaaaacgcttattaggattattgctattaatcctgtcaatcactggctttgttgcttgtagtgatgatgaaccgcaagacaaagtaaaaactgtaaaaatgcttatttctgacaaaacaggtacttatcagccttggggaagtgattctcccattgattgtatgctggtgaaagaagaaagtgaaagcgactacaaaacgctggattttcaaggtattactgatttcgtttacgaaaaaggctatgagtatgctttatgggttgagaaaagaactttggttgatcctcctgctgatgggagtagcattgtctacaaattgatagatgtaatatcgaaggcaaaagtagagtatgaatacactataaaagtagatggccctaatccttttatcctgtctcccgaaggtggtgaatatgaaataccttttacctgtaaagcgaagaaatttgcagagggtggtctggttgaagataggtatattcctttaaaagggttgagatataatatgggtaccaattacggagggttgacaagagtcgtaaaagatggtgaaaaggttgggttttataaatttgtaatagaaggtattccgcgttttaatatgaaagcggctcctgtatggtattgtggtatttacactccggatgcagatttacttttcggacctgagccggagcctatttataagcaactgtttgaacaaccgcaaacagagggtgaggattattttatgtattcggtagtctttatgtctacaggcacatttgctgaataaactctaaaataatatttgaaatatacctgaaccgtgtctggtccgtaccaactccgtacctggtccgtataaaggtacctttattgggagttgatacggagcgggtatggagttgatacggagttggtatggacttggtaaggcagcgagagtatattagcggatgcatcaagagttgtgggtgaatcttatatttaagaatattaaatgtttttcttctttataaaccaaatatgattttttcgcttcgtctataaacagagaaatcaaaacatgaaatttctgtaatccgagctaatggtggcattagtatctgtaaatgacatagaatgatgcgattgaataaagtaatcttatctgtaatcagctatattgtagtaggcagttttcaaatagtcgtatggggacaaaccattagtggcaagataatagacagtgaacagcgccccatagagggggtaaccattgtattgcaaacggtagactctatttatatagatgcgtcgatatcaaacgctgacggtatattcactttgaatggccaacaagaaaaataccgcttgattattcaacatcttttatttcatacgaagcaagtaaccggcaatgggaaaaatgccgggactattcagttacaacctcaggattatgccttagatgaagtggtggtaaaggcggaacgcccatttgtaaaagtggagaatggacgtttaggttataatctcgctgttttatctgaaaagcaagtagtgaataatgcttatgaagcattgatgaggttaccgggagtgcaagaaagtaagggagtgttgactctggtcggtgcaggaaatctgactgtaatcctgaatggaaaacctaccacaatggatgtcgggcagcttgaaactcttttgcgtaatactccggtaaacagggtggagaaagtggaagtaatgtatagtgcaccccctgaatatcatgtacggggagcggttatcaatgttgttttaaaacgctcgaatgactattcttttcaaggagaagtaagtgctgattataagaatcaatattttaatagcggtggcatgaaagggaatttccgtttatcgacacccaaaatggcttttgatgtgatgtatggagcgaatgatgtgaagaatatggaatatatagacctcgattccaggcatgcactgaagaatgaacggtacgatatcagccagaatgagcaattacgcagtaagtattggaatcacaatttcagaactgcgtttgagtataatttcaatgacaatcatacgattaatgtgatatatacaggtagctatagccccgatcagtataatagcagcgaaacgacagggaattatcaaaccagtaatgtggataaatatcttgatacgcggatgaataatgtcacattgcagtatcattcaggatttggacttgaaataggtggtgattatacgcattataaatccgacaatcatcaaagtctttatgccgactatcaggatggcaggcaaagcagtttctcaatggttggcggacaaagaatagatcgctattctatttatgcagatcaaaagcattcattatctaaaggatggagtttaggatatggggtgtcctatcggtttgcaaaagatcgtgattttcagatttatgataaggtagtgggggatattcatactcagaatatgtactctgatctgaaagaacagactactaatttttatgtgtcactcagtaaaaactacgagacaggagtttcgttctctgtatcggctacgggagaatattatactatcggcaattatcataaatgggcggtttacccacaggcatcgctgacttactttaaaacgccaaagcatacattccaattctccttatctacagataagacgtatccgggctattgggatatgcaatcgtctgttagttatctcaacgggtacactgaactgtggggaacgccgggattgaaacctatgactaattacaatttgaacgggagttatatcttgaagcaaaaatatatttttaacctgttctttatgcatactccagattactttatacaaactccttatcaatctaccgacagactggcgctaatttataaaaatacaaactggaactatatgcagttgtggggagcaagtatcatattacctttcaaaacaggaaattggttggattctcgattgactgtagccggtatgcagatgaggcaacgttgtgatgatttctttgatatacctttcaatcgaaaaaagtgggtgttcagtgctatgctggataatacttttaaagtgaataaaaatctggcttttgaattgatggggaatgtgcagacaccggttatacaaggaacattcgatattgaatccatctttaatcttactgccggattgaaatggagttttgcaaacgacaggatgagcctttccgctcgttgtaatgatattcttaatacagggatgcctaagacaaaagttcgtttcaagggacaggacttagatatgaacagtgctttctattcgcgggcttttactctgaatctcagttatcgctttggagggtataagaaaaagaatctgaaagaggtggatacatcaaggtttggaatgtaattgttattaggtggaacacctggtatattgaacaaaaaagctctgaaatcattcgatttcagagctttaagcggtgcgtacgggactcgaacccgtgaccccatgcgtgacaggcatgtattctaaccaactgaactaacgcaccataatttcatttctttaattgctttctctctcgattgcggttgcaaaggtaggcatttctttgaaacctgcaatagctacgatgaaatttttttgcttgattttatcacttttccttttatatcctcattttgagaacattggaatatgaaaaaaaataagttcttgcagagctttttgtgaaaggggattgggatggttttgtaatgaaaacgaagctttctgttgcttgatttaaacttcttgctcgaaaacttcgttattttacaataaatcgttatttttgcaaactcaaatcgagaaaattgtaatttgaaaacgataaaaacgataatttaggatgatgaaaacggccaaactgttacttcactgtcccgacaaaccgggaattctggcagaagtgacagactttataacggtaaacaagggaaatattatctatctggaccaatatgtcgatcatgtggagaatatctttttcatgcgtatcgagtgggaattgaagaacttcctgataccgcaagagaaaattgaagattattttgctacgctgtacgcacagaaatatgaaatgtttttccgtctctatttctcggatacgaaaccacgcatggcaatatttgtgtctaagatgtcacattgcctgttcgatttgctggcacgctatacggcaggagagtggaatgtcgagattcctcttattataagcaaccatcccgacttgcaacatgttgctgaacgtttcggaatacctttctatctgttccctattacaaaggagactaaagaagaacaggagaaaaaagaaatggaattgctggcaaaacataaggtgaactttattgtactggcgcgttatatgcaggtgatttcagagcggatgattgatgcatatcccaatcggattatcaatattcatcactctttccttcctgcatttgtgggagcaaaaccttatcatgcagcatttgagcgtggtgtgaagatcattggtgctaccagtcattatgtaacaacagaattggatgcaggaccgatcattgaacaagatgtggttcgtatcactcataaagatactgtagaagatcttgtaaataaggggaaagacctggaaaagattgttctctcgcgtgccgtgcagaagcatattgagcgcaaggtactggcatataagaataaaacagtgatatttagttaaggtatattcatgaaagtagcgattatcaaatataatgcgggcaatatctattcggtggattatgcgctgaagcgtttgggcgtggaagctgtggtaacggcggatagagatgaattgcgtgcggcggacaaagtgatctttccaggtgtgggcgaggcggaaacaaccatgaagtttctgcgtgccagtggtatggatgcattgattaaggaacttagacagcctcttttagggatatgtctgggtatgcaagtgatgtgtcgccattctgaagaagggggagatgtggattgtctgggtatttttgatacggaagtgaagcgtttcgttccacagaagcatgaggataaagtgcctcacatgggttggaatacgctcacagagacgaacagtggcttattcaaaggctttacaaaagaagagtttgtctattttgtgcatagcttctacgttccggtcaatgaatatacagctgctgtgacggactatatacaaccgtttagcgctgccttgcataaggataattattatgctacccaattccatccggagaagagtggaggtgtgggagaacgtatcctgcgcaattttttagaattataattaagtagataaatatatgatagagcttatccctgcaatagatattatcgacggaaagtgtgtacgcctttcgcaaggtgactatgacagtaagaaggtgtataacgaaaatccggtggaagtggccaaagaaatggaggcatacggtattcgccggcttcatgtggtagacctggacggagcggcttctcatcatgtagtcaattataatgttttgaatagaatcacctcacagacttccctgatagttgatttcggtggtggtgtgaaaagtgatgaagacttgaagatcgctttcgagaatggggcacagatggttacaggcggcagtattgcggtgaaaaatcctgagttgttctgtcattggctggaagtttacggcagtgagaagataattcttggtgcggacgtgaaagaccggaagatagctgtgaatggctggaaggatgaaagtgcttgtgaattgttccctttcctgaaagaatatgtagagaaaggtattcagaaagtaatctgcacggatattagttgtgacggtatgttgcaggggccttctattgaactgtataaggtaatgctggaaaaacatcccgacctttacctgatagcaagtggcggtgtcagcagtatggaagatatacgtgcattggagacgactggggtaccggctgttatttttggtaaggctctgtatgaagggcgtattactttgaaggaaattgaaagaatgatgcaagattattgacgaatcattctcaattctcctcccgggaggaggggaaattgagttagatttagattatatatcctcatgaatataaatcgttaaaacaaaacagaagtgttagcgaaaagaattattccctgtctcgatatcaaagacggacaaacagtgaaaggaaccaatttcgtcaatttgcgtcaagcgggcgatccggtggaactggcgcgtgcgtatagtgagcaaggtgctgatgaattggtttttctggatataacagccagttttgaaggtcgcaagacatttgcagagttggtgaagcgcattgctgccaatatcagtattccgtttacggtaggtggcggtatcaacgaattgagtgatgtagaccgtctgctgaatgccggtgcagataagatttctatcaattcttctgcaattcgccgtcccgaactgattgatgaaatagctaagaacttcggttcgcaggtatgtgtgctggcggtagatgccaaacagactgaaaaaggctggtggtgttatctgaatggaggccgtgtagaaacagataaggagctgtttacctggacaaaagaagcccaggaacgtggtgccggagaaatacttttcaccagcatgaatcatgatggcgtaaagaccggatacgccaatgaagcacttgctgaaatgtctgataacctttctattccggtgattgcatcgggcggagcaggagcaaaagagcattttcgtgatgtatttttgcaaggaaaagctgatgcagcgttggcagccagtgtttttcatttcggagaaattaaaattcccgatttaaaatcgtatctttgcgcccagggaatctcgatgcgaacggtgtaaggggatgataaaatggtaagatgataggatgcttataccgcattataattcgtaaattgtaattcgtaattatataaaaatggattttgataaaatgaacggacttattccggcaatcatacaagacgcagacaccgccaaggtgttaatgttgggcttcatgaataaagaggcttacgacaaaacggtagaaaccggtaaagtgacttttttcagccgcaccaagaaccgtctttggacgaaaggtgaggagagtggtaatttcctgaatgtcgtttctatcaaggaagactgtgatcaggatacattgctgattcaggtacaccctgtgggacctgtttgccatacaggcacggatacatgctggggtgagaagaatgaacagcctgtaatgtttctgaagcatcttcaggattttattactaagcgccatgaagagatgccggaaggttcttacacaaccagtctgtttgagtctggtgtgaataaaatggcacagaaagtgggtgaagaagctgtggaaacagtgatcgaagcttgcaacggaactgatgaacggttgatctatgaaggagccgatttgatataccacctcatcgtgctgctaacatccaaaggatacagtctggaagatttggcacgcgaattgcaggaacgtcatagcgcttcgtggaagaaacactaattaattaaaaattaataattaataattaaacgggaatggctgaaccgctgatacgatataaagatgtggaagtacaccaacaggacttgtgcgtgctgaatgaggtaaacctcgagctgcagaagggagagtttgtgtacctgatcggtaaggtaggttcgggtaagaccagtttgctaaagaccctctacggagaactggatatcactgccggcgaagcaatggtactggggtatgatatgagccgcattaagcgcaagcatattccgcagttgcgtcgtaagttgggcatcgtgtttcaggatttccaactgttgacggaccgcacggtgaacgataatcttgcttttgtattgaaggctacgggttggaaaaacaaatcggaaataaaagaccgtattgctgaagtgctgatgcaggtaggaatgggtaataaaggatacaagttccctaacgaactttctggaggcgaacaacaacgcattgttattgcccgtgctatgctcaactctccggagattatcctggcggatgaaccgaccggtaatctggatgcggaaacgggacgtgctattgtaggactgttacataacatcagccgcacgggtggctcgctggtattgatgactacgcacaacctccatctgcttcacgagtttccgggacaggtatatcgctgtgcaggtcatcagataacagatgtgacatccgaatattcgaatgtcatgccgactgtagaagaaacaaataataatatataatcatttaatacaggaacgaaaatgaaagttttaaagtttggaggtacttccgtaggttctgcagcgcggataaaggaagtagccaaattgatcactgatggtgaacagaagatagttgtactctcggctatgtcgggcacaactaatacattggtggaaatttcggactatctgtacaagaaaaatccggagggtgccaacgagatcattaacaagctggaggctaaatataaacagcatgtgaatgagttgtattccactcccgagtataaacagaaaggtcaggaactgattaaatctcattttgactacatccgttcttataccaaagaccttttcacgctgtttgaggagaaagtggttctggcacagggagaactgatctctactgccatgatgaactattacctgcaagagtgtggagtgaagtccattttgcttccggctttggaatatatgcgcaccgataagaatgcggagcccgatcctgtatatattaaggagaaacttcagatgcagttggaattgcatcccggtgctgagatttacatcacacaaggatacatctgccgcaacgcttacggagaaatagacaatttgcaacgtggtggaagcgactataccgcttctttgatcggtgcagctatcaatgcttctgaaatccagatatggaccgatatcgacggtatgcacaataatgacccgcgtatcgttgataagactgctcctgtacgtcatcttcattttgaagaagctgccgagctggcttattttggtgcgaagattcttcaccccacttgtatacagcctgccaagtatgccaatatcccggtgcgtctgctgaatacgatggatccgactgctcccggtactatgatttccaatgataccgagaagggcaagattaaggcagttgcagcaaaagataacattacagctatcaagattaaatccagccgtatgttgcttgctcacggtttcttgcgcaaggtattcgaaatcttcgagagctatcagacttctatcgatatgatttgtacttctgaggtaggagtatctgtatctgttgataatacgaagcatctcaacgagattctggacgacctgaagaagtatggaaccgttacggtggataaggatatgtgtattgtctgcgtggtaggtgatttggaatgggagaatgtcggtttcgaagcgaaggcactggatgccatgcgcgacataccggtacgaatgatctcattcggtggtagtaactacaatatttctttcctcatccgtgaatgcgacaagaataaggcattgcagtcgcttagtgatgcactgttcaacgaagaataagagaaataagaaagtacagatataatatgatatggaacgcaaactacacaaattacacaactcgctgataaaggctcttgtgtaattcgcgtaatttgcgttcttttctttataaacaaagttttgaagtatgaaaggaacattccccatagataaattccgtgagctgcatacccctttttattattatgatacgaaggtgttgcgtgatactctttcctgcatgcgtgcagaagccgctaagtatggcaattttgaggtacattatgctgtgaaagcaaatgctaatccgaaggtacttaccattatccgtgagaatggactgggtgccgattgtgtgagtgggggagaagtgcgcgctgccatcaaggctggctttcctgcgaataaggttgtttttgcaggagtaggtaagtccgattgggagatcaacctgagcttggactacaatatcttctgtttcaatgtggagtctattcctgagttggaagtaattaatgaattggcggctgctaaaggtaagatcgctaatgtcgctttccgtatcaatcccaatgtaggtgcacatacgcatgccaacatcactaccgggctggcagagaataagtttggtatcagtatgcaggatatgaacgatgtgatagacgtggcactggagatgaagaatgtgaagtttatcggactgcacttccacatcggttcgcagatattggatatgggtgatttcgtggctctttgcaatcgtgtgaatgaactgcaagataagttggaggcacgccgcatccgtatcgagcacgtcaacgtaggtggcggactgggcattgattataagcatcccaaccgtcaggcggtacctgatttcaaagactatttttcgacttatgctgagcatttgaagctgcgttcttatcaaacgctccattttgaactggggcgtgccataacggggcagtgtggttcacttatctcgcaggtgctttatgtaaaacagggagcaaacaaaaaatttgctatccttgatgccggtatgacggatttgattcgtcctgcattgtatcaggcttatcataagatagaaaatatcacttcagaagatacagttgaaacttatgatgtggtaggtcctatttgtgagtcatcggatgtattcgggaaagcgatagatttgaataaggtgaagcgcggagatctgatagcgttgcgttctgcaggtgcctatggtgagattatggcttcaagctataattgccgcgagttgccgaaggggtatacttcggacgagttggtataaagacttaatcttttcatgattcagccacattaggttggagattagaggaaaaagctatctttattgtcataacattaaaagaataaacatgtttgttataagttttgatatgactggtccgattctacggacattgtaaaaaatgcgtaagaactcctaaaagtataaactatatatatgaagcgtgcacatcatccttttgatgattgtacgctttcatttttatttcctatcctcactttctttactttgtattcacaaacattacgcctttgatttctgttttcaggagttattttgtagtgtgcaactttcaacccaaaagttatgaatacagaaagatttgagaaagatgaaggcggtatggaccttgcgttatatatggcgcaggttatcattattatattaaggaagaacggagatatcaaaagtcttcgcccggttttaaaaaacggtgcgcacgcccggagtcacaacgctcgctcaatcggtgcgtgctatgaaggtggactggatgtgaacggatgctctgccgatacgagaactgactttcagaaacattccctccggctgcttgccaagttgctgctaaaagattatccgcatttccgactggtggggcatcgcgacctcagtgctgacttgaatggtaatgtgaaatagaaccggaagaatggattaaacagtgtccgtgtttcgatgctgctgcaattctgcgggaaaagcctgccaatccgggttgttttatataaaaaatgttattaaatgaacaatgtctgtgtatcattgttacttttgtaatgatttcaaattaattaaaaaaatacgattatgattactgaaaaattacagaatgcaattaacgagcagatcacggctgaaatgtggtcggctaacatgtatttggctatgtctttctatatggagaaagaaggttttagcggtatggcacactggttgaagaaacagtgggcagaagaaaacgaacatgcctgtgcaatggccgattacgtaatcaagcgtggtggtaaagccaaagttgataagctggatgtagttcccaacgatttcggtactccgctggaagtatttgaacaggtttacaaacacgagtgccgtgtatccgaaatgatcgataagttggtggatgtggctgccgccgaaaaagataaagcaacacaggacttcctgtggggatttgtacgcgaacaggtggaagaagaggcaaccgctgcaagcatcgttgatatgattaagaaagccggtgcaacgggtatcttctttgtagatgtgaaattgggcgaacgttaataatcttttgatatagaatcactaagtagggaagctgtctgaaaaaaaaatcagacagcttcttttttgttttcttgggattatacatattttattctacctttgttccacttatggatcagatagtcgaatcatgaaaaacgcatttctgcctatatatgcatggatttttctgttttttttcgttttgagcagctgttcgaaccgggaagaacggcgaattttaatcgtgcattcttatgaggaaagctatgtcggctatcctgatttcaatcgcttgatagataaagaattcagaagaaacgggatcgatgcggatatccgtattgtttatctggactgtgaagcgtttcaggaagaaccggaattgaggcacatgtatcacttgcttgattcagcttccagtggttggaggcccgaggttatcctggtgaatgatgatcaggctgcttattcactgttcaagtgccgtcatcctttggtgaaagagacaccggtggtttttggtggagtgaactatcctaattggaaattactgaaagaatatcccaatgtgacgggatttcatgaccggatggatattatgaagaatatacgtctgggagcaaagctctttggtgaagaggtggagttttttacggtgctcgattctacgtatatagacagacagatacgtgctgatgtaagagaacaggtgaaaggtgagaaagtgacttgcctggtgggctattcgggcacccctcgcgaaaggcggttgcattatccttccaaagaggggtatacgcgctttaccagtctgccggtgcgaattgggagagagcaggaaactgccaattttatctggaccttgagtaaatattccaccggaatgtgttatctccagatgaagcgcgattatacgacggtcaatatcggaaatatatgtgcaagtcctagtctgactgcgatcaatgaagcattcgggtataatgaaagattgcttggcggatatattacgacatacccgattttggcggaagaggaagtgagtgtcgctgtgcgtattttgcatggtgaaaatccttcggatatacccgttgcggaaagccgcaagaaatatgtggtggattggaacgtgatgcggcaacggggaatttcgaagacacgtattccggcagaatgcacgattataaatattcctatcagtgaaaaatatccggtagcatggggagtcggtattgtggtgattgtcgttcttttttccactttgtttgtctggcttttcttcttgtatcgccgtgaacaggggcggaagaaacgtgcgctcaatgaactggaaagtgaaaaagaaacgttggcactggctctcgaaggcggagatacatatgcgtggaagctggagaatgattgttttctttttgagaaagacttctggatatcgcaggagctgaaattcagaccgataagttttgaagagttattgttgtttatgcatcccgatcattgggaagaggtgaagggatattggaaggatatctctaaagcgggcaagataatatctcgggtgcgctgtgatttcaatggtagagggtatcagtggtgggagttccgttataagaccattttgcttcctggaggagggtataaagctgccggcttattgctgaacatacaggcgattaaagaccgtgaacaagaactggaagaggcgcgccaactggccgagaaagccgaattgaagcaatcttttctggcaaatatgagtcacgagattcgcacgccgctgaatgcgattgtaggattctctaatatattggcgcttgatgaagatgtgagccaggcagaacggttggaatatatcggcagtattaataagaatagtgatttattgctgaaactgatcaatgatattctggaactttcgcgcatcgaatccggatacatgtcatttgaatacgagaagtgtttcgtttcagaattggttgacagtatttatatgactcatcagatgctgattcctgaacaactggaattcatcaaagagttggatgcggtgcaggtagaagtgatgcttgataaggggcgcttgacacaggtgatcactaatttcctgaataatgcttctaagtttactaaaaccggatatatcaagttgggataccgttatctttctgaatcggaccgagtggctatctatgtggaagataccggaagaggcattgaactctcagaacagaaaatgatctttagccgtttctataaacaggatgagttttcgcaaggagccggcttgggactttctatctgtcaggtgattgtagaaaaattgcggggcaaaatcgaactgtggtcggaaccggggaaaggaagcaggtttacggtggtgctgccggtggtaaaagctacaagctacaagtgacgagttgcaagttcctttcggtgtggtagtctggcgaataattattcgcttacgaataaacgtagcaacttgtaactcgtcacttgtagcccgtagcttatcgtgctttagcgcgataatactccaagttcttttcctactttgatgaatgcatctatacacttgtcaagatgttttctttcgtgtccggcagagatctgtacacggatgcgtgcctggtctttcggaaccacgggataatagaatccggtgacgtaaatgccttcttcttgcatacgggcggcgtaaatctgcgaaagtttggcatcatacagcatcacggcgcagatagcactttgtgtaggcttgatgtcaaatccggcggcagtcattttctcgcggaagtaattaacgttttctactaatttgtcatgcagggcattgctttctctcagcatattgaagacttcgatacttgcaccgatcacggcaggagcaacagaattggagaacagatacgggcgactgcgttggcgcagcaggtcgataatctctttgcgtccggtggtgaatccgcccatggctccgccaaaagccttgcccagtgtaccggtgtaaatatccacacgtccgtaagttttgaatagctcgctcacaccgtggcctgtaggccctactacaccggcagagtgagactcatctaccatgaccaaagcgtcatacttttctgctagatcacagatttgatccatcggagctacattgccgtccatggagaatacaccgtctgttacaacaatgcggaaacgttgggcctgtgtttcctgcaaacatttctccagttcgctcatgtcagcattggcatagcggtaacgtttggccttgcacaagcgcacgccgtcgatgatggaggcatggttcagtgaatcggagatgatagcatcttcctcagtgaaaaggggttcgaatactccgccattggcatcgaagcaggcagcatagaggatggtgtcttctgtcttgaaatagtcggagatagcagcttccagttctttgtgaatgtcttgtgttccgcagatgaagcgtacggaagacatgccgtagccacggtgatccatcatcttttgggcagcggcaatcagtcgcggatggttggacaaacccaggtaattgttggcgcagaaattcagcacttccttcccttttacggtgatggcggcttgttgcgcactctcgatcaggcgttcttctttgtagagtccggcctctttaatttcagcaagcgtattgctgaggtgttctttcattttcccgtacatagctttataaattaaaagtttgtcatcttattactaaacgatacaaaggacacgatttttcttcaaataaccatagcaaaatgatagaataatgaaaaaaaagtatgtatatttgcacgtctctaaggatggagcaccttataaataagtcgtatgaagaatattttggtaattggagcaaccggacagataggttcggaactcacattggaattgcgtaaacgttatggagatgaccatgttatagccggatacattccgagtgctatgcctaaaggagaattgaaagcatcggggccttctgctattgccgacgtaaccgaccgtcagtctattgaagtggtggcgcgccaattcaagattgatacgatttataatctggcagctttgctctcggtggttgccgaaagccgcccggccatggcttggaaaattggtatagacggattatggaatgtgctggaagtagcgcgtgaatatggttgcgcagtgtttactccgagttctatcggttcgtttggagaagctacacctcatgtaaagacgccgcaagatacgattcagcgtcctcgtacgatgtatggggtaaccaaagtaactactgaattgttgagcgattattattatactaaatatggagtagatactcgtgcggttcgttttccgggcatcatttccaatgtaactcctccaggaggggggactacagactatgcggtcgatattttttactccgcagtgaaaggtgaaaagttcgtatgtcctttgaaacccggtacttatatggatatgatgtatatgcctgatgcgctgaatgcagccatttcgttgatggaagcaattccaacacgtctaaagcatcggaacgctttcaatatcgctgccatgagttttgatccggaggaaatctgccgggagataaaaaagcatgtgcccgattttgaaatggtatatgagattgatccattgaagcaatccattgccgacagttggcccgacagcttggatgacagttgtgctcgtgaagagtgggattggaaaccgcaatatgatttagagtccatgacggtggacatgcttgagaagttaagagctaaactaaataagtgacctttaggggccggtaaagaatgagaaaaataggattggggttctttcttctcgttttcttggtgtcgtgcggcaacaagaagacgaagatggatccttttgcgacaatcaccaatttggtggattcagctgcacacaaagctgatgctgtaccacaggctgaagttgataatgaccctaagccaatagaagcggatgaatcgtttgatgatttcgtctatagttacgcttcggatgacgctttgcaacggcaacggactaagtttccattacctttttacgacgttgataaaccttctaaaatagagaagggggagtgggaacatgattatctgtttacccagcagagctattacacattgctcttcgatgatgaagatgacttggaattggtgggagatactgccttgacatccgtacaggtggaatggattttgctggaaaaccgtatggtgaagaaatactatttcgaacgtaccaagggggtctggatgctggaagctattaatctccggcagatagagcagggggagaatgaagacttcgttgcgttttatttgcgttttgtgactgatagtgtttatcagagccggcatattcgcgaacctttagaatatattacgatagatccggatgatgaattctctatcctggagactacactcgacttgaatcagtggtatgctttccgtccggtattgcctgtagacagactgtccaatatcaattacggacaaaagaatagcgattactctaatacgaaaatcctgaaagtaaatgggattggaaatggatataccaatattttctattttcgcagacatcgtggagagtgggagttatataaatatgaggatacgagtatttaggaaattacgaattacaaatgacgaatgatagagcatgagatgagaaaaatacccaatacattcggacttgatgtagaagctgccgtgtttttggaatacagttcagtagaagaattggagaagttgattgccgctggacgcatcacttctccttatctgcatattggcggagggagcaatctgttgtttaccggaaattatgagggggtgatattgcattcgcgtattggcggcattgaagtaacggctgaagatgaagaaaaggtttcggtgcgtgtaggtgccggtgtggtgtgggatgatttcgtgggctattgtgcggatcggggttggtatggagttgaaaacctgtctcttattcccggggaggtgggggcttcggctgtacaaaatattggtgcttatggcgtggaagtgaaagatctgatttctttcgtagaaacggtgaacatacaaggcgtgaagcatgtttaccaaacggatgaatgtgattattcataccggagcagtgtttttaaacggccggaaatgaagcaggtgtttgtcacatatgttggtttctctttgagtaagaaagagtcttatacattggactatggtactattcgtcaggaacttgagaaatacccgaaagttgacttgaagacattacgacaggttattatcgatattcgtgaaagtaaattgcctgatccgaaagtattgggtaatgccggaagcttctttatgaatcctgtcgttgcgcgtgaagtttttgaagccttacgggaacaatatcctcagatgcctttttatgaaatgagtgctgaccggataaaaattcctgccggttggatgatagaccagtgtggttggaaggggaaatcgctgggacctgccgccgtgcatgataatcaggcattggtgttggtaaaccggggtggggcaacgggggccgatatcgtagctctttcggatgctgtaagggcgtcagttcgcgataagtttggcattgacatacatcccgaagtgaattttatttgaagtaatcatgattatcagaggtcgcttttgaatgaactgatgattgataattaatatgtaattaaagtgaaactaagaatattaggaagcggaacatcgacaggagtgcctgaaataggttgtaagtgcgaagtttgcacttctgccgatccgcgtgataaccgcttgcgtgcgtcttctttgttgcatacggatggcgcggtgatactgattgattgtggaccggatttccgggaacagatgttgagggtagcttcatttgaaaaaatagatggagtactgattactcatgagcactatgaccatgtaggaggactggatgatcttcgtcctttctgccgtttcggcgagattcccatatattccgataactatacggcaactcacttgcgtgcgcgaatgccctattgttttttggaacataaatatcccggtgtacctcagattttcttgcaagaagtggagccgggaaaaaacttctttatcaatcatacggagattattccttttcaggtgatgcacgggcgtctacctattctgggatatcgtataggtaaacgtttggcttatattacagatatgctgaccatgcctgaagagtcctatgaacaattgcaagacttggatgttttggttgtgaatgccttgcgtgtcaagccgcatcctacgcatcagagtatttccgaggcattggagacggcaaagcgcattggtgcgcgcgaaacttattttattcacatgagtcatcatgccggattgcatgtcgaactcgaaaagcagcttcctcctgatgtgcatctgacttttgatggaatggaaatagagttttaaaggcgggcattctaaaactttttttatatctactaaagtttttgaaacatttgttttgttttattagtagaaatacttatttttgccgaaacttgatgcctgaaaaaccatgaagttacgccttatcataagaattgccatgattgtgtccatagtgttgctatgtacggggttcggggtgtattcattctttaggttgaatgaggtggagagtcagaaagattttaatctctatactctagtgcctcaaagcgcaatagctgtgctggaaacagaccgtatggcagaattggtggatgacatcaaccagttgagttgcagtaaagataatcacttcctttatgcttccgaactttttgtttatctgaaaaactatctgcataccttgcttgaggatactccgcacggacttagtaagcagatgaacaaaatgcttatcagttttcatgagccggatacgccattgaaccaagtgttgtattgcagtctgggatcaggtgattatgagttggtggagtcattcatcaggaaatattgttccagttcattcccttctaaattctttgattacagaggtgaggaaatcagcatttatcctatgcctgacggacgtttcctttcagcgtatttcacatcggacttcctggcgatcagctttcagaagcgattgatagaacaggtgattgaagcgcggctctccaaaaagtcgttgataaacatgccttcattcaaactgatgcatgccgggaagaatgcgaacgtggaagctacggtgtatgtgcgcattaaatcggtggagatgggtaaaaatacagatggtattcgttcgcagacctatttgggaagttgggcggaatttgatttgaagctgaatgagaatgctatttattgttcggggattagtcacggatcggacactacacatacttttataaatgctttgcgtcgccagcagccggtagaggggtttccgggagaacggcttccactttctactttcttttatgattgttgggccatttcggacatggatgccatgtgcagctttacggcggaacaggaatatgccaaggcgacttattccgattatattaaagaaagagatgaagaatggatggatttcttgaaaatgtatgcaggagatcaggtgatatcctgtctttttcagtcgaaagatacagtaaatgagattccttgtgcggtgatgagtgttccggtgaagaatgtgttgcaggctgaacgccgcttgcagtcattgctttatacttctccgaaggaagtggatgcgcctcctgttccgcaggcataccctgattatcatctttatccaaaggcgaaaggatatcgttattatatattgcctcgtaataccttgctgactcaattgacaggtatcacagagtctgctctttatacgtatgtgtgtttttatcgcgggcatctgctgatggcaccggatgttgtcagtcttacggcttatatagatgccatggagaatgaggaagtattggatgatattccgttgtatgaagaggggattgggagtctttcacccacatatagttttgtaatgatggtggatatggaaaagatggtggagcaaccggaaacttatgtgcgtctgataccgaactttttctttcgccaggcaaagttcttccggcatttcgtgctttcaatacaattcacttgtgtggaggaggtggtatatccgaatctggtgtttttatacaaaggagaaaaatataagatttaacacaaaaaaagggagaaactttctccctttttttgtgttaaattctttttagtttagaatggcagatcatcttttgcgtcacctgtgaggaattccggtgcggcagtcggtgccggtggcggaacaggtgcgcccggtgcgcctgcaggggctgttgcactaacacgttctactttccatgcgcggatactgttgaaccaacgatcctgccattggcgtgcgtccacatcaaatgatacggtcagttcttcgcccatctggatgttaaactgttctattttgtctgctccgaaaacatcgaaacacattttgcggggatattggccgtggtcttcaatcacgtattcttgtgctttccactcattgcccgactttgccactccgcctcttggttggagtatagcgataatttttcctgtaaattccattgcgttcttttttaatgatgcggcgaagttacaattttttagggaaatccggagaggttccgggtgttttttcttaattttctttgctgtgggaagatctttttttgtaactttgtccgatactatgaagttatagtacgaatagggaataatataaaacttaaatacacagaacatatgaaatttatcgtttcgagtactgcgctctccagccatttacaggctatcagccgtgtgattaattcgaagaatgcgttgcccattttggattgtttcctctttgaactgaaagacggaacattgtcgattactgtttctgatagtgaaacaacgatggtgacatcagttgaagtgaatgaaagtgatgctgacggacgctttgccgtagctgccaaaacaattctggacgcattgaaggaaatccccgaacaaccgctgtcatttgaagtaaataccaattccttggaaatcacagtacagtatcaaaacggtaagtatagcctgatgggacagaatgcagatgaatttcctcaatcggctatgctgggtgacaatgccgtacgcgtagaaatggatgcatccgtattgttgggcggaattaatcgcgctgtatttgctacagctgatgatgaacttcgtccggtgatgaatggtatctattttgatattaccacagaagatattacaatggtggcatctgatggccacaaattggtgcgttgcaaaacactggctgccaaaggtaatgaacgcgcagcatttattctgcccaaaaagccggcttcgttgattaagaatttgttgcctaaagaacaaggacaagttgttattgaatttgatgaacgtaatgctgtgtttacattggaaaaataccgcatggtgtgtcgtctgattgaaggacgttatcctaattataattcggtgataccgcagaataatccttataaagtgactgtggaccgtatgcagttggtaggtgcattgcgtcgtgtatctattttctcatcacaggcaagcagtcttattaagctgcgtatgcagcccaatcagattgttatttcggctcaggatattgatttctctacttctgccgaagaaacactggcttgccagtatgatggtaacccgatgagcatcggttttaaatcgacttttctgattgatattttgaataatatcgccgctgatgaagtgataattgaactggcagatccgtcacgtgcaggtgtcatcattcccgttgaacaagaagaaaatgaggagttgttgatgctactgatgccgatgatgctaaatgattaaaaaaataatagagttaacgaggaacgagttgacaaggagacaagggctgtgctgttatgctgggaatgccttgttcccttgtcaactcgttcccttgtcaactgtaaaatagaagaataatgaaattaaacctcaaaaacccgattgttttttttgatttggagacgaccggaacgagtatcaatgtagaccgtatcgttgaaatctgttatctcaaagtacaccccaatggtaatgaggaagcaaaaacacttcgtatcaatccggaaatgcatattcccgaaggtgcgtctgctgttcatggcatctatgacaaggatgtggcagattgtcctaccttcaaagaagtggcccgtactattgccaatgatatagaaggatgtgatttggcaggatttaattccaaccgttttgatattcccgtgctggcggaagaatttcttcgcgccgatgtagatattgacctgagccgccgcaagtttgtggatgtgcaggtcattttccataaattggagcagcgtacactttctgctgcttataaattctattgtggaaagaatctggaggatgcacatacggcggcagctgatacgcaagcaacttatgaggtgctaatggcacagttggaccgttattcggaattgcagaatgatgttgcttttctggcagattattccagctttaacaaaaacgtggatttcgcaggacgtatgatttatgatgataatggtgtagaagtatttaactttggaaaatacaagggaatgtcggtgacagatgtgttgaagcgcgatccgggctattatagctggatattaaacagtgattttacactgaataccaaggctatgttgacaaagatccgtctacgtgaattaaccaataagtagtatcatggcgaatacactgaaagggaagaaaattgtattaggaataaccggaagtattgctgcttataaagcttgttatattatccggggacttataaagcaaggtgctgaggtacaggtagtcataactcctgcaggaaaagaatttataactcccattacgctttcggcattgacgagtaagccggttatcagtgagttttttgcccaacgtgacggcacatggaatagccatgtggatctgggtttatgggcggatgctatgcttatagctccggcaactgcttcaactattggcaagatggcaaatggagtggctgataatatgttgattacgacttatttgtcggctaaggctccggtatttgtggcacctgccatggaccttgatatgtatgcccatccttctacacaaaagaatctggatacgctccgttcttatggaaatcatattatagaaccgggtacgggagaacttgccagccatctggtaggcaagggacgtatggaagaaccggaagtcattattcaacatctggcgaattattttgccgagaaagaaggtgatttgcgaggtaagaccattatgatcactgccggacctacttatgagaagatcgatccggtacgttttatcgggaactattcttccggtaagatgggttttgctattgcagatgaatgtgctgcccgcggtgctaaggtcattatgatatcaggtcctgtacaacagcaattgaaatatccagtacgttggtttcctgtggaatcggcagatcagatgtataatgctgcgtgtagcttttttgcagaggctgatgctgctattctttcggctgctgttgccgattttacaccggaacaggttgctgatgctaagataaagcgggaaaaggaaggagaaatgacgttgcgtttgaaacctacgaaagacattgccgcctgtctgggacagatgaagaaagaacgtcaggtattggtaggttttgctctggaaacgaatgacgaacagcataacgctgaggataagctgcgacggaagaatctggattttatcgttctgaattctctgaatgataagggagccggtttccggtacgacacgaataaaatcagtatcattgaccgtgaaagcaagacggactttccgttgaaatcaaaggcggaagtagctgcggatattgtagattgtctggtggaagtattggagaataagtaaatatagatagtgaggaataagacactttatatgattctgcttctggttgctgtggcgctaaagtccactgcccaggaattgaattgtaaatttacggtgaattattctcagatacaaggtacgagtacacaggtttttactacgcttgaaaacgccttgatggagtttatcaatacccgtcggtggacgcaggcgcagtatgaagtgaatgaacggattcgttgttctatgaacctgaccgtgaaagaatataatgaggaggacggacgttggaagtgtgagctgattgtacagtctacacgccccgtctggcaatccgggtatcagacggtagtttttagctttaaagatacggatgttgctttcaactatcgtgagttcgatccgctgcaactgagggataatgttattgacagtaatctgacggcagtaattgcttattatgcttatatgattatcggactggacatggacacgatggctccacagggtggtacggaggtttttcgggcagctgaagacattgtaacggccgcacagaaccttggtgaaaccggttggaaagcgttcgatagcagtcggaatcgttatgcattagtttctgattatctggaagatggcatgacgcctttgcgcaaactgatgtatggatatcatcgtacaggtatggatgaactctctgtgaatgttacccgtgcccgcgctgtaataacatctatgcttagcggtctgaaagaggcgcaacagaataagccaatgtcggcattgcccggtttgtttactgaaataaagaaagatgaattgattaatctttattcccgtgctgcaatgaaggaaaaggaagaaatatgtgaactactatcatctgtcaatccttcactgactaccgagtgggaaaagataaagcaataattaggaagtgagtaagattaaaattgtaaataagtcatgttacgttcgctttacatacagaattacgcgcttatagaaaagcttgatattagctttggtgcaggtttctccgttatcacgggtgagacgggtgccggtaagtctattatactgggtgctatcggcttgttgcttggtcagcgtgccgaagtaaaagccattcgccagggtgcatcgaagtgtgtgattgaggcccgttttgatatttcagcttatggtatggagcctttctttgaagataatgaactggaatatgaagaagagtgtatcttgcgtcgtgaggtttatgcatctggtaagagtcgtgcatttatcaatgatactccggcttcgcttgtacaaatgaaggagttgggtgaacagttaattgacgtgcattctcagcaccagaatcttttgttgaataaagaaggattccagttgaatgtactcgatatattgtctcataatgatgaacaactttctacttatcaatctttgtatagagaatggaagcaggcacaacaggaactggcagacctcatagcccgtgctgagcagaataaggcagatgaagactatatccgtttccagttggagcagttggaagaagcaaatttgtctgcaggtgaacaggaggaactggaacaggagacggatatgttgagtcatgctgaagaaataaaggccggtttgttccgtgtcggacaattgttgacctctgatgaaggtggtctgctggccgggttgaaggaaagtctgaatacaatgcttggtctgcaaaaagtttattctccggctactgaacttgctgaacgcctggaaagtacatatattgaattgaaagatgtttcccaggaagtttcttctcaggaagaggatgttgagtttaatcctgatcgtctggaagaggtaaacgatcggttgaatctgatttataccttacagcaaaaacatagggcaaccactgtggaggagttactggcacttgctgaagaatatgcagcaaagttggcggccattacttcttatgatgaacgtattggtgagttgacaactctttgcgatactttacataataaggtgagaaagcaggctgctgttcttaccaaggcccgtaccggcgccgctcgtgaagttgaaaagcagatggcttcccgcttggtgccgttgggtatgcctaatgtgcgttttcaggtggagatgggaataagaaaagaatctggtgtgcacggtgaagataccgtcaactttctcttttctgccaataaaaacggctcattgcaaaatatttcatcggtagcttccggtggtgagattgcacgtgtcatgttgtccattaaggcgatgatagccggtgcagtgaaattgcccactattgtatttgatgaaatagatacaggagtatccggtgagattgccgaccgtatggcggacattatgcaggaaatgggagaacaggatcgtcaggtaatcagtattacccatttgccgcaaattgctgcgcgcggatgtgcacattataaagtatataagcaagataacgaaaccgaaaccaatagccacatacgccgtctggcagatgaggagagggtagaggaaatagcccatatgctcagtggggctactttgacagaagctgctttgaataatgcaaaggcacttcttggtatcaaaagatagcctttaatttttaatttctaattttaatttctcaaagatggttgataagagtgaaatgattttcggcgttcgcgctgtgatagaagcaatacaggcaggaaaggaaatcgataagattctggtgaagaaagacattcagagcgatttatccaaagaactttttgctgcgctaaaaggaactttgattccggtgcaacgtgttccggtggaacgcattaaccgcattacccgtaagaatcatcaaggggtgattgcttttatttcatccgttacgtatcagaagacagaagacttggtaccttttcttttcgaagaaggcaagaacccgctgttcgtcatgttggatggtgtgactgatgttcgtaactttggtgctatagctcgtacctgtgagtgtgcagctgtagatgctgttatcattcctgctaaaggaagcgtgacggtgaatgctgatgcaatgaaaacatctgccggagcattgcatgttctgccggtttgccgtgagcagaatctgaaggttacattgcaatatctcaaagatagtggtttccgcattgtggcagctacagagaagggtgactatgattataccaaagctgattatacaggaccgatgtgtatcataatgggagctgaagataaaggtgtttcttatgagaacctggctctttgcgatgagtgggtgaaaatcccaatgctgggtactatcgagtcgctcaatgtttctgttgcggcaggtattttgatttatgaagctgtgaaacaaagaaccaactaagatatgaagaagaacttgttgttgacgctcgccctctgtttgctggcacagtggagtgtagctcaggcacccaaatgggtggaaaaagccaagcgtgctgttttctcggtggtcacgtatgacgagagtgataagatacttaatacgggaaatggattttttgttaccgaggacggaattgctctgtctgattatagcttgtttaaaggtgcgcagcgtgccgttgtcattaattcggagggtacacaaatgcctgtggaagttattatgggagcaaatgacatgtatgatgttgtgaagttccgtgtagcgatttcaggaaaaaaagtacctgcattagtggtagctcctgtggccccgactgtaggtgcaagcatttatctgttaccttattctacacagaaagatcgttcctatactaccggacaggtgaaagaagagtctaaggtagagggacaatatcattattatacacttgatatgcagctgaaagacaaaatggtaagttgtccggtaatgactgctgagggacaagtattcggtctggcacagaaatcttctggaaaagatacagctaccatttgctatgcagtaggtgccgattatgctatggctcaaaagataagtcctctttctttcaatgatcatactttattgagtatcggcattaagaaagcattgcctgaaacggaagaacaagcattggtttatctctatatggcttcttcacagcttgcaccggagaaatacaccgagttgctgaatgagtttatatctcagtatcccaacagtgctgacggttatcttcgtcgtgcaaacaatcaaatcttccagtcgaaggaggcaagttcaatggataaggttgctgctgatatggataaggcacttgaagtggcacaaaagaaagatgatgcatacttcaatcgtgccaaactgatttatggttatcagttggataaacctgaaaaaacctataaagattggacatatgacagggctttggatgaggttcgtaaagcgattgcaatcgaagctcttccggtttatgttcagttggaaggtgatatccagtttgccaagaaggactatgcggctgctcttgccagttatgagaaggtgaatgattccaatattgcctctccggctacattctttagtgccgctaagacgaaagaattgatggaagcagctccggaagaagtgttggctttgatggatagttgtatggcgcgtttcgtgcaaccgtatagtgaagaagctgctccttatctgctggaacgtgcccagatgcgcctgaatgccggacaaggaagaggtgcgatgcttgattatgatgaatactataaagcggttcgtggcaatgtgaatgatgtgttctattattatcgcgaacaggcggccgttcaggcaaagcagtttcagcgtgcgttggatgatttggcaaaagctattgaacttaatccgaaagagctgacttatttttcggaacttgcggtggtgaacattcgtgtggggagaaatgaagaagcgatcaaggtgctgaaagatgctttggaaattgattctaaatatgctgaagcttatcgtttgataggagttgcccagctacagttaaagcaaaacaaagaggcttgtgccagcttcgcaaaagccaaggaactgggtgatccgaatgttgatgctttaatagaaaaacactgtaagtgatagtattgcagatgatatctttataaaaaaggctcggctttcacaagccgagcctttatcgggaaactcccgtgtcaaaaaagaattagctaagtctaggttttaaaacaggtataagtgaatttttcttttgtgtataatcctattaagtaaatgcatgaagttgcagaatactgcataagataccaattttttttcttgaatgaatcataaattgttgaatactaaaataatattagaatgaaaaaagtaatttgcagtcagaaagctccgggagctattggtccttacagccaggctatcgaagcaaatggaatgatatttgtatctggtcaattacctattgatgcgactaccggacagatggcagaaggtgctgaagcacaggcacgtcagtcattggagaacatcaagcatatccttggagaagcaggtttgacgatggcaaatatcgtcaagactactgttttcctacaggatatgtcattgtttgcagatatgaataaagtatatgctacctattttgatggtgatttccctgcccgttcggctgttgcagtgaaagccctgccgaaagatgctttagtggagattgagtgcatcgcggttcgctaacaaatcggcaacaataaaactactgcctcccacgaagataaagtcttccgggaggcttttttcttgtgcagcccgcacggcagagggaacatctggatagcaatttccttgcaatccggcctcagaggcaagttgggcaagttcgctttcaggtaatgcacgccttacgctggcttttgtgaagtaatattcggcttcttggggtaataatgctaatacaccgtgtatgtctttgtcgtttaccatacctataatcatatgtagtttccggtaagattgctgtttcaactgctctgtgatataggtgatgccacctacattgtgtccggtatcgcatatcagggtaggggcatcctgcaatttttgccagcgtcccatcaggccggtcagttcacagacatgggcgaagccacttcgaacagcctgctcactcagattgtatccggctttccgtagttctgggatggctgtgagtaacgtgcgggtgtttttagtttgatataatcctttcagctcacattccaatccggggtaatcatccttttcatcttcttctgcaaagagaatgggagcacctacttcgcgagccttttttgcaaatacaggttttgtttcaggagtcgtttctccgattatgacaggtattccacttttaatgatcccggctttttctcccgctatcttttctaatgtattacccaggaattgggtatggtcaaaactaatattggtgatgatacatagatccgggtgtacgatattggtgcaatccagtcttccgccaagtcctacttcgataaccgctacatctacatgttcgtcagcgaaataccggaatgccatagcggtagtcaattcaaagaaagaaggatgcagagactcaaaaaaatcacgttctttttctacaaaccggactacatattcttccgggataggctgttcgtttattcggatacgttcgcggaaatctacgaggtgcggagatgtgtagaggcctacccggtaccccgcttcctgcaagatagcagcaagagtgtgcgagcatgaacctttgccattcgtacctcctacatggatactgtggaagttccggtgcgggtgtccgaagtgttcatccagtgccaatgtattctccaaaccttccttgtatgccgaacttcccacctgttgaaacatagggacactgttatataagtataataaagtgttctgataatccatcttttaaaatatttaacgagaaagcaaactattctctctttttaattcctatcttagaagctgcaaagataatgcaaactgagagcagaataaaatgaacttgttcattttttatgccgaagtacagcttatcttcgctttggaggcaatatcaacaatttaaatctaaaagagtatgggagcaaagaaaaattttgtgattgatacgaacgtaatccttcacgactataactgtcttaagaatttccaagagaacgatatttatcttcccatcgtagttcttgaagaattggacaaattcaagaaagggaatgaacagataaacttcaatgcccgtgaatttctccgcgagctcgatttagttaccgatgacaatctttttaataagggtgcttctctgggcgaaggactgggaagtttgtttgtaattgccggttcggtggatgctccggatgtgttcgattcattccctgagcgtattcccgatcataagattctggctgtagtggactggttgacgcgccaaaaaaaggatatgaaaaccattctggtgacaaaagacgtgaacctccggatgaaagcacgttccataggcttactttgcgaagattatatcaacgacaaggtgataaatgtggatatatttgaaaagtcaaatgaggtgtttgagggaattgatcctgctttgatagaccggatttattcttccagagaaggactggatatcagtgagtttgatttcaaagatatcatccatccgaatgaatgttttatcttgaaaagtgacaggaacagtgtacttgcccgttacaatccttttacacattccatttgtcgggtgaataaaacaaagaactatggcattgaaccccggaatgccgaacaaagttttgcttttgaagtgttgaccgatccaaacatcaaattggttgctttgacaggtaaagccggtacaggaaaaacattgttggctctggcagctgcccttagtcaaatgaatgactataaacagattttgctggcgcgtccgattgttgctttatccaataaagacatcggtttcctgccgggtgatgccaaagaaaaggtagctccttacatgcaacccttgtttgataatctgaatgtgatcaaacgtcagtttgcttctaactcaacagaggtaaaacgtttggaagatatgcagaaaagtgagcaactggttattgaagcattagctttcatccgtggacgtagtttgagtgaaacttattgcattattgatgaagcacaaaacttgactccgcatgaggtcaaaaccatcataacccgtgcgggtgagggtacgaaaatggtatttaccggtgatatccaacagatagaccaaccttatctcgacagtcagtccaatggcttggtttacatgattgatcgtatgaaagatcagaacctttttgctcacgtaaatttgttaaaaggagaacgtagccaattaagtgaattagccagtaatttgatgtaacagagctttataggtcgtaaatatggtggcaaagttatacctgtaactttgccaccatttaattttatcacacatttttatctttttcttgtcctatttgataaaaaataatgtatctttgcctcgcctaaaacaaaactgtcaaacgaaatgaaacataaaatttttcatcggtacctttcagcaaaggtattgccgatttggactattctgttgatcgatgtattgataatcgtcgtatccagcttattggcttatgcgcttcgatatgatttccggagtattttcctggaatcctctaccattgacaaaacgattgtatggacggtcattgtcaacttagtcttctttagggtgttccgcacctattccaacgtattgcgcttttcttcgtttatagacattatgcgcatttttgtttcattgacggtgtcttatgcactgttaatgatttcgagtgtgcttttggcaagttatctggatattcgtctggcacctgtgagtgtactgtttatggcgtatatcattagctttgccattatgtcttgctcacgtatagttgtgaagatgttctatgaacttctgaattttgatggaagtcatagtgccaatgtctttatatatggtactaaggaagcgggagtgaacattgcgaaagcgttgcgcgtcaacctgcgtaatcactatcgtctgcgtggtttcatagcggatgagccggaactgattaataaggtgatgatgggcgtaaaggtattcccgaatgacgagtctctgattgatgtattgaatgaccgcgatgtgcatacaattattatttcgccggctaaaatggaagaactgaagaagtctgatatggccgatcgtcttttggcacacaacatcaagcttatgactgcacctcctttgagcgagtggagcggacagactttgaaccgtactcagttgaaagaaattcagattgaagatcttctgcaacgcgatcctattgaaatagatattcataaggtagcttcccatctcgaaggaaagcgcgtaatgattaccggtgccgccggttctatcggtagcgaaataatgcgtcaggtagcttccttcaatccttataagctaattctggtagatcaggcggagactccgttgcatgatattcgtctggaattgcaggatcgttggcgtgacattgatgcagagactattattgcggatatttccaatgctacgcgtatggaagatatcttcaaggaataccaaccgcaatacattttccatgcagcggcttataagcatgtgccgatgatggaagataatgtttccgagtccattcagatcaatgtgttcggtacgcgtacactggctgatctggctgtaaaatacggtgctgagaagtttgtaatgatctctacggataaggctgtaaatccgaccaatgtaatgggatgttccaagcgtatctgtgagatttatgtgcagtctttagctaagaaacttcaggagaaaggtgggcatgtgacgcaattcattacaacacgtttcggtaatgtgttaggttctaatggctcggtaattccacgttttcgtgatcagattcaacgtggtggtcctgtaacagtgacacatcctgagattatccgttatttcatgactattcccgaagcttgccgtctggtacttgaagccggtagcatggggaatggcggtgagatttatatctttgatatgggtaaaccggtgaagatagtggatcttgccaagcgtatgatcagcctttccggacgtacggatgtgaagattgagttcactggattgcgtcatggtgaaaaactgtatgaagagttgctgaatgtgaaagaactgacaaagccgacttatcatgagaagattatgattgctacagttcgcgaatatgattatgatgaggtgaagcaacgcattcagaagttgatagaggttagttacacgtatgatcagatgcagattgtagctgctatgaaggatattgttcctgagtttatcagcaagaattcatgctttgaagccttggataagaaacccgaataaagaaaaagttcctatgtaaaggaaacgccaatatatgtaatgccccgtaacaatatatgttagatatgctaacaatatatgttacggggcattacttataatgatatgttgtgcggttcctgtttattttttactggagaaatatttcatgaactgagtacgttcgaaggtatttactccattcaagtcgttgacattcagcattcccttgaattgagggatgttttccatgcctttgcgatccatccataagttcaggaagtggatatattctcctacaagggcataactgttctgatagaatgcgctacaaatctctacagctgaagctcctgccaaaattgcttttacaatgccttcgggagagtgaataccacctgatgctgcataatccagcttattcacagctgcggaagcgataccgatccagcgtaaggctttaaccaggtcagctcctgtgctgaatacatttcctgagatttgcttcatcttttcgatatcaatatccggttgatagaagcggttgaacaataccacggcagctgctccgttggcatatagctgatctatcagagctatcggattagtcaggttatcacccagcttcatgatgatcggaatgcgtaccgtctttttgatgtggctgagaatatcaatatggcgttgttcgaatgaaccgtaattgtattgcatatctgtctggagagccaggatattgatttctatagcatcagctcctgccgcttccatttgttgcgcaaatcctacccattcagcatcctgatagcagtttatgctggcaataacaggaatggggcatacttttttagtatccttaatcagttccagatactctgacagtttatgttggcggacgtattctaccaagtaatcactgccttcaggatacatattcggatctcccagccagtcagcttccaacatgatctgctcttcaaaaagagatttcagaacaatggcaccgacaccggcttcatagaatttctgatttttttcagcactatcagttaaacctgagctgctgacgataatcgggtttcttaattctaacccggcaaaagtagtttttaatgttgccatggtaataatgtttaatgaataatgattaatacgttctgtctccaaagattttgcttcctacgcgtatcagagtacttccagcagcaatagcttggtgataatcgtgggacattcccatggacaactcccgaaaagcctccgtgtcggcaaaccatgagtctttcacttctttgaagaagctacttaatgaacaaaattccttctctatttgttcattgtcgtctgtatttgttgccatacccatcagaccgcataattgtatgttactgagagttttccattcaccggctgctaacatttcccgacattcgccaaaactaaaaccaaatttggtttcttcttctgcaatgtgcagttgcaacaggcagttgactacttttccggcttttgcagcttgcttattgacttctacaaggagtttgtatgagtcaattccgtggatcagagccacgtagggcacgataaacttgattttattggtttgcagatgcccgataaagtgccattcaatgtctttaggaagactttcgtacttggcagtcatttcctgtactttgctttctccgaatattcgttgtccggtacgataggcttcttctatcgcttcattggggtgaaatttggagacagctaccagtcgcaccccatcaggcagttcgcttagcacttgttgaagattctctgcaatattcatgattagaaaattgaaatatgaaattcaaaagttgaagatcaaagcattctgtgtttacgctaatcacttcaactttcaattctcaaaagattaaacttccggtttgtcattgggttccgcgctatacggatatacatccataaggggtgtttcggatactaaagcgatctggtaatccgccatcgtacccttcatgccttcatccagtttcttaacagcatcgcgcaggtcggcagcttgtaccaatacctgagtggatgttttcttttcagctccactcttttcgtccagagtaataaagatcagtttacacttgaaccaacggtcggcagcctcttcttcgctggggaataattcactatagttggcacgtttgatgtctgatactgtaaattcgcctgaaataaacggtgtcatttcttcaatgatgcgtgcttccgcttccgtaaagctgagtgcgtccaccaaataaggttctgtaactttcttgttcataccgttttccatcactttttcgtaacggatcttgcactcaaaccatgtatgcattgccataattcctttgttttttaattatgaatttatattcttgttataaaactgactacaaagataatgcaatttgagtgcataactttcatgctcgcatgaaaaagttatgctgagattttttattgtttctttttatgactggtgcttcatccttgaaaatgtacttctacataatttgtctcatagtatcagaaatatctgttgtcaaataaaagagcctaaatagaggcaatcgcctgtatatcattgattggagggagtgtgatttctcgctgttattgctgttctttggcgcgttaaacctataaaaacaacaaaattatggtagtagcttatttaagagtaagtacagaaaaacaatttctggctaatcaacgtgaagaacttctgcgttttgcagagaagaatggattacagattgacaagtggtacaccgaaacggtgagtggtagtgtgagaagcaaagaccggaagctatcgggggtgttgaaccgaatgcaaagaggtgactcgctgattgtgacggaaatttcaagattaagtcgtacaatgttggaaatcatgacgattcttaattcttgtatcaagaaagaaattgttctgtacagcacaaaagaggggtatgtatttcaaaatgacatgaacagcaaggtattggggttcgcattcggattaatggcagagatagaacgtaatctgatttccatgcgaacaaaagaagcattggcaaggcgcaggcaagaaggggtaaaattgggacgaaagaaaggaacctgtcctgctatgagggtacttcgtgagaacaaaagacgtttgataaaagatgctcaacgaggtgtttcctgttcggagctggctcgccagatgggagtatcccgaactactatgcatcgtttcctgaagtgtaactaatgagaaaacgagttgacaagttcctgtttccaggcactttagtcaactcgtttctccgggcagtggaattcttaattatcctacgggaatttctttatcttcgtttttctctttcatgctttttccacgtttatgcaaactcttcagttcaaatgacaacatgatgcggaagaatccgataatcaggaatgcgaatgaaatcatgtaaactgcatagagagcgcctattgccggttgccataagatgatgagcgaacaaattacggccaatatgccgaaagcaatataccagccccagtctcttgtaccatatcttttcagatccatggcatagccgacagatgagaagccccggaacatcagccagaatgcaataatgaaaggaataacttccatactgagtaatggataagctatcaggtaaaaaccgaatatcatgtcgatgatacctccggccagataccagccccaactggatacatttttccggttgcttacagcaaaagaaatctccagcaaaccgctgaataacatggatatgctgaacaggatactcaaaactgcgtagccgctcaacggtgcgaacatcaggctgacggcaactactacgtagagtatgccaagcaagagagagagccaccagttttttacttcgcattgaagttcgtcaaataaagttttcatgcaaattgaattttaaatggttattgtaatcatgtttgtgagagtaacaatttacagttggaaaagttttgagcgaacttttctaacagttcgtttgttatataaacatataaaaaaaagaaaactatggctacaacaaaattcaagggacaaccggttaagattatcggtgagtttataaaaacaggaacagttgctcctgatttcgagttagtaaagactgacctttcttctttttctttgaaagatatgaaaggaaagaatgtgatattgaatatcttcccgagtttggacactagtgtttgtgcaacgtctgtgcgcaagtttaataagttggcagcaagtctgcctgataccgtggtactggcgatttccaaagacttgccttttgctcacgctcgtttctgtacgacggaaggtattgaaaatgtaattcctttgtctgatttccgtttttcggatttcgatgaaagctatggcgtacgtatggcagatggaccattgggcggtttgctggcacgtgcagtagttatcattggtaaagatggaaaagtgatgtatactgaactggtacccgaaatcactcaggagccggattatgacaaagcaatagaggctgtgaagaaatagtaaattcagatttttaaatagcaataaaaaagataaggtgcacaaggggcgtgaggctattgtgcaccatttgttttttatatagtgagttggcgtgtgaattgattgtggattatcttttgtgtattttatttgctttatggtgagtaactgactttttttgttttactttgtaccatgaaatcaagtattaatagataacaaagaaaaatggaacgaggtttaaaagactacgccttactcatgctgaaaggtgtgggaatgggagcagccgatgtggttcccggagtatcgggaggaacaattgcttttattgtgggaatttatgatgaactgatagattcgataaaaagcatcaacggaaaaagtttaaagttgttttttacaggaaaatggggagcgttctggaaagctattaatggtaattttttaatttccattgtagctggaatcgctgtcagtgtattttcgttggctaagattattacatggttgcttacggatcatccggtaatggtctgggctttctttttcggactggtgctggcttccacttggtttgtggggaaagatataaaggagtggaataagaaaacaattccggcttttatcataggagtgtcagttgcttattacattacggtggcaactcctgctgaaacgccatccaatctgtttttcattttcctttgcggtgcgattgctatttgcgcaatgatcttgccgggcatatcgggtagttttattttggtactgttaggcaaatacttctatataatggaagcggtcaagacatttgatatagcgactttattagtattcttggcaggcgcctgtataggtataactactttttcacgagttctttcatatgcactaaagaactttcgtaatattacgttggcggtattgaccggctttatgctggggtctcttaataaggtatggccatggaaagaaacgcttgaaacgttcacagacagtcatggagtagtgaagccactggttgaagcgaatatccttcctaatcaatatattgttgaagctgtagtattgatgattgttggtttcttcctggtatattttttggagaagctttctacacgtagcgctaaataaggataccctctacaatataaaaaaaacagagagtaaagcggtcagctttactctctgtttttttattgcaatgcttttatgatattttgcatataaacagccagatcttcccggtcttcattttccatcatagcctgcattttctccagttctttcagatcaaaggggcgggtgcatttctgattgtactttatgaagttttccttatcatgcagcgtcatgtagagaacggtcaacttttcattgataccttcaaattccggttctaactcacaaacacgttcaaaagctattttcgcataatccagatacccgatttccatgctgtgcatacctatttcattccaggtatcagcgctaggagcacaattcaaggcctttgcccattgctttattcccttttcgtagtcaccttcttcgacgtacatgcggccttcaatcaggtaggcttcaggatctttcggttccagcttttgggctttcttacaatactggtgcgctttgcgcttctttttcattttggaaaggcaaagccctgcattggcatataggctgggtagagtaggtgcgggagtttcttctgcttcgttagcctggattgctttttccagattttcgtatccttcttcccattcgcctttggataccttgcataaaccgatataggtatagacaaactcaggagccagtccatgcatttgctcagctttctgataacattccagagctgcatcctcattacccaactggtaaaaacaatgccctttcattacataggcgtctgcaaattcgtcatcacctatcaatgcatagtcgcaggcatcaattgcctggtcgaagttcagatcttcaaaatggcatcttgccagtccgaaccagtagggagccgaatatggattctgatctatcagttggttatatagaggaattgcttcttctatcatgcctttcccatagtaacagtctgcaactacggcaatgtaagcttcttcatcggcatattcttcctttaccgggttgagccatgccagagccttgtccggatagcccatatcgaggtacatataagatacatcgactacatttgccagatcctctttatcttcaatcgtatcgagtaactgttcggcatcatccagcttaccttcactcagcagcaagtgagcacgtaccaccttggcttccggcgaataggtatcgggaaggttttcgatgatttcacgtgcctttgttctttttccgctatccagatgcaggtaagcatattctatcattaatgccgtactgtcgggatgtagctttaggccatattctgcaatttctaaagccttatcataattctttttggtgccataccagtcggcaaggtcagccaaatcgtctgcgtccagataaaatggttgtttcgcggacattaccgattcatattgttcggcaagttcctgaagttctttatctctgccggacagcaggtttttattgctcattaatagtttactcctataatccttactttatttgttaatcttgccccaggtatctttcaaccctacagtacggttgaataccatcttttccggtgtggagtccggatctacattgaagtaaccgatgcgctggaactgcaagtaagtaagcggtttcatgcctgcggcatatttctcaatgtagcaatggggcagtatatgcaatgaatccgggttgatgatttctttcatcgcttccagagcatcgcagtttttagcttcgcgaatagcggcaagctcgtcgcgtgggttctccactttccacagacggtcgtagaggcgtacttcggcttcgagacaatggtcgcagctgacccaatgcaaagtacctttcaccttacggtttgcttcgggcataccgctcttggtgttcgggtcgtattcgcaatatacttcgactatttctccggcttcatttttcttgcaaccggtacattttacgatataagcattcttcaggcgcacttcctgtcccggagtcatacggaaatattttttgggagcatcctccatgaagtcttcacgttccatccacagttcacggctgaattcgatgaagtgactgccttcttccggtttttccggattattgatggcttccagttcttccacttgtccttcggggtagttggtaataaccagcttcaccggattcacaacggcagatacacgaattgcgcgggaattaaggtcttcgcgcagggcactttccagcaaagcaaattcattgagcgcatcataagtggtatatccgattttatcgataaacttgtggatagactcaggagaatatccgcgacggcggaaaccacagatggtcggcatacggggatcatcccatccgttcaccagtttctcttttaccagagtcaacagattacgtttgctcatcagcgtgtagctgaggttcagtttattgaactcatactggtgagggcggttatcattcaaatcctgtccttctttcacccagtctacaaaaagatcgtagagcggacggtgaggaacgaattccaacgtacagagagaatgggttacgccttcgaagtagtcgctttgtccatgtgcgaagtcatacatcggataagctttccaagtggtgcccgtgcgatggtgcggatggttcactacacgataaatgataggatcgcggaagtgcatgttcggattcgccatgtcaattttggcacggagcaccatagcaccttctgctatttcacctgtattcatcttcttgaacaaggagagactttcttctattgggcggttgcggtagggactttccacacccggttgggtaggagtacctttctgctgtgcgatttgctcggaagtctgctcgtcaatatatgctttaccttcttcaatgaggcggatggcaaagtcccacaattgctggaagtaatcggacgcatagtattcattaccccattggtaacccagccattgaatatcttctttgatggcttctacatattccacatcttccttggtaggattggtatcatcgaaacgcagattgcagatgccattgtggtcggctgcaataccaaaatcaaggcaaatagccttggcgtgaccgatgtggaggtatccgttgggttcgggcgggaaacgcgtttgcaccttaccaccgtttttaccctcttttaaatctttctcaacaatttgttcaatgaagttgaggctctttttttcgcctacttcttcgctcttaatatctgccataatggtatgtatatattctaaaaatcaagctacaaaagtaagacatttttttcgtttatccttatttcacgggaatatatccactctttttaatgatttcctgaccggcaggtgacaggatgaaactgatgagtgggtttacttgtccggcgttttccgtattatagtaataatacagaggtcgtacgatggggtaactcttgtctgtggcactttccattgtgggcggcgcaaagtgtttaccgtcataagatacggaaagtgacttgacgcgaggggagagataagccaaccctacgtaccctatcgctcccttcgtctgactgacggattggataatggctccggtggcgggcatggaaaggctactgctcatataatttttatttttgagaacgctttccttgaaaaactcataggtgcccgaagatgtttcacgggaatatactacgattttacgatcatctccacccacttgcttccagtttgttatttttccccggaagatatcttccagttgttggcgtgtcagttgtttcacggggttggaagggtgtaccacgacggcgagggcatcgtaggcgacgattacttcttctacttccttgcctgcggactttactttcattttctcgctgaacttgatggggcgggatgccatggcgatatccgttgttccgtccaataaagcggaaatacccacgccggtaccgccacccgtgacggtaatccgggcatcgggattgagcgccataaacctttcagcggtctgttgcgctacggggagtacggtgtcgctgcctttaatacgctgtgcttgcatgctacttgcagctaatgtcaggagtaggataatacttattcttttcataataggtattgtttataattactttatgtagtaaactaatgatagtataacaaccttcatactactctttttgtttattctctgcaaataaagcaatcgtgtattacgatgctattacaaagcttgtgtttttgcgggttgtaacgcttttgtaatatgtttgaaacatttctttcaaatgttagtcacactctcttaacatcggccccgtttctttgcatgcagaatatcaacaggtatttatgaagaaactttttgaaaaaatagtagaaggtatattggcttgcagtggtttcgtaacaagcattaccattgtgcttatcatcctgtttctcttttccgaggcgttgggattgttcaacagccgggtgattgaagagggatatgtattggcattgaataaagataataaggttactgagctgacaccggctcagataaaagatgttttcgacgaggaaataacaaactggaatgaggtcggagggcaggatatgcctatccggcttttccgtttggaggatatcacccagtattataccgaaaaagaactgggaccttcttatgaacacgccggagcaagaattaccgagttggtggagcgtacaccgggcatcattgcttttgtgccgcaacagtttattgtccggcaagactccgtacacttgttgcgcgataatacgatttcagtgaaagacgtctttgccggtgccgaatggtttcctacggctacacctgccgcgcaatttggctttttgccactgataacgggtacattatgggtgagtctttttgccattctaattgctcttccgttcggcctttcggtagctatctatatgtccgaagtggcaaatcctaaggtacgcaatttgttgaagccgataattgagttgctgagtggtattccgtcagtggtatatggcttcttcggattgatagtcattgtgccgctcatacagaaagtgttcgacttgccggttggcgaaagcggtctggcgggaagcatcgtattggcaataatggcattgcccacgattattactgtgacagaagatgccatgcgcaactgtccccgtgccatgcgtgaagccagtctggcattgggagcttcgcaatggcaaactatatataaggtggtgataccctattctgtatcgggtatcacttccggagtagtgctgggcatcggacgcgccatcggagaaacgatggcggtattgatggtgacaggcaatgcggctgttataccgcataccattctggagccgttgcgcaccattcccgctacgattgcagcggaactgggagaggcacctgccggaggagctcattatgaagctttattccttctgggagtagtattgttctttatcagtttgctgatcaacttcacggtggaagctgtatcggcccggaaaagatagtgttttacagagaaaagtaaaatgagtatgatagataggaaacatctttcgcaacgcattgtattcggtacattccgtttgctgagcctgacggtggtagggatactctttgccattctcggctttattatatataaaggtataggagttatcagttgggagtttctgactaccgcgccgaaggacggcatgacggcaggtggtatttggcctgccatcgtcggcacattctatctgatgataggcagtgccctgtttgcctttccggtgggagtaatgagtggtatctatatgaatgaatacgctccgaagggctggatcgtccgttttatccgcatgatgacgaataatctgagcgggataccctccattgtctttggtcttttcggtatggccctgttcgttaactatatggggtttggcgatagtatccttgccggctctcttacattgggattgctctgcgtgcctttggtgatccgtactaccgaagaagcgctgaaagctattcccgataccctgcgtgaaggaagccgggctttgggagctaccaaattgcaaaccatctggcatgtgattctgccaatggccatgccgaatgtgataacagggcttattcttgctttgggacgtgtttccggtgagaccgcacccatcctgtttacttgtgccgcttattttcttcctcagttgcccacaagtatcctcgatcagtgcatggcattgccttatcatctatatgttatttctaccagtggtacggatatggaagctcagcttccgctggcttatggcactgctttggttttaataataatcattctctttgtaaatcttctggcaaatgccttacggaagtattttgagaagaaagtaaagatgaactaacgggaataataaacagtaaatgaaatgattggtaaaatagaagcaaataatgtaaacttctggtatggtgactttcatgctctgaaaggtatcagtatgtcgatagaagaacgttcggtggtagcctttatcggtccttcgggatgcggcaagtccactttcctgcggttattcaaccgtatgaacgatctgattcccaatacccgcctgacaggtgaaatccatattgacggaaaggatatctacggaaaagatgtccaggtggatgaactccgtaagaaagtaggtatggtgttccagcgtcctaatccttttcctaaaagtattttcgagaatgtggcctatggccttcgggtgaacggggtgacggacaatagttttatccgccagcgtgtggaagagtccttgaggggtgccgccttgtgggaagaagtaaaggataagctgaaagtttccgcttatgcactttccggcggacaacagcaacgcctctgcatagcccgtgccatggctgtgtctccctccgtattgctgatggacgagccggcttctgcgctcgatcctatttctacggctaaagtagaggagcttattcacgagttgaaagaacagtatacaattgttatcgttacacacaatatgcagcaggctgcgcgcgttagtgataaaacagcattcttctatttggggcaaatggtagaatttgacgataccaagaagatatttacgaaccccgagaaggtggagactcagaactatattacgggccgttttggataggcatttgtttcattgcttgaaactctgagtttctcggtgtgaaaccaacagtttcaaaggatgaaactaagagtttcacggcatgaaaccgggagtttcacacagagaaactaaaggtggctcgctgcaagactcaaaagagtgacaggcttcctctaattaatcatataagtaatcttaaaatagaaatttatggtaaagtttatcgaatcggaactcgtcttacttaaaaaggaaatagacgaaatgtggaccttagtatataaccagctcgaccgggcaggggaggcagtcttgaccttcgaccgcgaactggcgcagcaagtgttggtgcgcgaacgtcgcgtgaatgccttggaattgaaaatagacagtgacgtagaagatattattgccctgtacaatcccgtagccattgatctgcgttttgtgcttgccatgctgaagatcaatacaaatctggaacggttgggggactttgccgaaggtatagcccgtttcgtgctgaactgtaaggagcctgtcctcgatccggaccttttgaagcaattacgtctggaagaaatgcaggcgcaagtacttgccatgctggaacttgccaaaaaggctcttcaggaagagagtcaggatctggcaacttcagtctttgctaaagacaatttgttggatgaaattaatgctgaagctactacgattctggcaggttatattgctaaacatccggacagtgttcttccttgcctgaacctggtaagtgtcttccgtaagttggagcgttccggcgaccatattaccaatattgccgaagaaatagtcttctttatcgatgcgaaagtgttaaaacatagcggaaaaacggacgaacattatcctttaagcaagaaatgagttcttttttaggtaaaatttagcgtttgttagaaaaatgctatatatttgtccattgaaaacgattgcggatgtggaaaggctatagaagtggtaataaaaccaaagaaatttcaaaaagatgttataagacatgttttttaatttggtaagtaacctgaaaagccgctatatttgcagcgttatcctgaaaacaatctttttaccttaaaaaaaactaatacctattgaaaactgaaaaatggggctttgtgaaaagctccattttttttgtacttatattccccttatttcgtatctttggagaagataaactgcatctcggcagaactttttcatgcaagcatgaaaattctgcgatcaatttgcattatctttgtgttctccaaataaggaattataaatcattaaatcgtaaattgaattatgttttccggaatagtagaagaatgtgccactcttgtggcattggtaaaagaacaagagaacgtacacttcacgttcaagtgctcatttgtaaatgaattgaagatagaccagagtgtatctcataacggtgtatgcctcacggtagtcagcatgacagaggatacctatacggttacagccatgaaggaaacattggagcgctccaatctcgggttgttgaacgtaggagacaaggtgaatgtagagcgcagcatgatgatgaacggtcgcctcgacggacatattgtgcaagggcatgtagatcagattgccacctgcatcagtgtagaagatgccgaaggaagttattatttcactttccggtatgctttcgataaggagatggcaaagcggggatacattactgtggacaaaggctctgtaacggtgaatggtgtcagtctgacggtgtgtaatccaacggacgatactttccaggtagctatcattccttatactttcgaatataccaattttcacgatatcaaagttgatagcgtagtgaacattgaatttgacattatcggcaaatatatcagccggatgctccagtttaaataatagttcaccacaaattacacaaatagtacagaaatattatccttttataatcagtgtttattcgtgtaatctgtggtgcaataaaaacatatatcaaatggactttttacaattagtagcctcccgtcagagtgaccgcgcttatgatatgacacgtcctgtagagcccgagaaactggaacggatactggaagctgcccgtctggccccatcggcttgtaatgcgcaaccgtggaagtttgtcgtaatcaatgatccggaactttccgttaaggtaggcaaagctactgccgggctggggatgaataaatttgctaaggatgcccccgttcatattctggttgtggaagaatcgatgaatgtcacttcatttctgggtgcaaagattaaggataagtatttccccttgatagatataggtattgccactgctcatatcactttagctgccgagagtgagggattaggttcttgtattcttggctggtttgatgagaaagagattaagaagctgaccggtattccatcttctaagcgcttgctattggttatcaccatcggctactctgtaaaagagaagagaaagaaggcgaggaaaccgaaggaaaaggtggtttcttacaataaatactgagataagtggagagttgagagttgagagtggagaattgagagttactatgcagcgtgacagcgcagccaactctcaattctccactctcaactctccacttatcaaagatctttcagtagcacatggcttgcgctcttataatattcttcccgtgcattcattaatacttcccattgttcgctgaactccttgtccttatctattttgaaatcctccgaaccatgcgtgtccagtctgtctaacaacagtgcgacgttcatcttattgatatccatggagggttgatagccgatatcttcattgttttcgtccactacttcatgcaatagatttatttcttgtaactcatatagaatctggtgtgtcaaccggatcggtatctgacactcttcggatatttcttctgctgtatatggttttgcattctcctcaaatcttttggcaatgagggacatgataaggatagccacgaaatcccgatacctccggctgatatttttggtgtctttgtcaaaactgaagttccgtatgttttgtcccgcatacgtcagttctgcaccaaacaggcagattgtccacgatatttgtaaccatagcaggaataggggaagggcggcgaaactaccataaatagcattgtaacgcgatacccacaactgaccactgatgtatagaaattggaatgcctggtgtgccgttcctgcaagaacccccgcaatgagcgcatgcttgaacttcactttagtattcggcatatagatgtatagtcctgtaaacatgaaccaggtcaaggcaaaaggaatgaggcggatcaggaatttcagaataggagcaagcagtacaaaatcttcaatgtacttcagcgttgtgctcatgaagatggagagaccacccgaaattacaatcaagataggcatcagtaggaacatagagaaatagtccgtaattttacggtacatacttcgtgccttttttatttgccagatgcggttgaaggttatttcaatattggtgatcaggttgataaccgtccatagtaacataattaaacctactccgataaatatgccgcttttagtttcagaaagataagagtctacgaattggaggatgacttctgtggtctggttatgccctccgaatcccattcgcacctgattctccatcagattggagaagccgaatccgcgtgctatggcaaataatatggcaagtatagggacaatggcaagcaaagtgctataagtcagtgcagaggcattgtttactagtctgtccttggtgaagcggttgatacataaataaatggttttgattatattgtagagggaaaaagtcgttttggtgacttcatcctctgtaatacgccagatgtcgtatgtaagaaatttccaaagagcagtaatacgtttattcataatcaatgaagaattaggaatgaagaattatgaatatagaacggagaactctatcaaattgttgtatcatgcagaaattcttcattcctcattctctgttcttaaattaaaaaaaagcagtcggtctgtaagccgggttctgttctctgttttcaggaagaaatcttcattattcattcatcattcttcattcagcaaagtgtctgtcatttatctgagccgcatgttaccatacaggctttagcggtctaccctccgacatggagcgagcagctctcatagcgtcggtttacatgaccttacaactcccaagacgcacagcccttgtgtcaccacaagactggtaggctcttaccctaccttctcacccttacccatgcccaaggacaccggcggttattttcttctacgttactctaccctcgcggacagctttctgttaggaagtaggatgctctatgttgcccggactttcctcatacgccgaagcgtaagcgacagaccgaccggctgcttttgtccggcaaagatacgatttttatgccagcggacacagaaacttgtagagtttttgtgtaagggagggctttttccgtatcttctccataattatagatacggacctggtacggaccggatgcggggtagataacctccggatagcttccttttctaaacactttcttaatattcctgaaaatatataaccaaagtagaaattatttctaactttgctaacacttaataacccccaaatcattttagctaatgaagaaacttattcctatcgtatccctgttcctttttgcttcgttgtattcggtagcttcggaaatcggggacaggactattcctgcggatgtagcacagttgtctgacagcttgaagcgtcagtatgctcctgataaacgggtagcactctttaatgtagattattccttttccggtaaaaatgtgatgttacgtggtgtgactacttcggccgaggcgaaagctgcattactgaacgggctgtcgaaagctgactatcaagtaatggactgcttacaggtattgccggatgaggctgtactggaaggaaaaacttatggtatcataaatgtatcggtgtccaatcttagggttgatcctgacttctcatccgaaatgatgacccagggattgatgggaatgcctgtccgtgtattacagcgcgacggttggtatcgcattcagacaccggataattatatcgcttgggtacatcgtgtaggtattcatccggtaacgaaagaagaacttcatgcctggaacacagcagagaagattgtggtgacttctcattatgggtttgtgtattctgaacccaatcagtcttcgcagactgtttcggatgtagttgcaggcaatcgcttgaagtgggagggaacgaaaggtgcattctataaggttgcatatcctgacgggcggaccggttatatttccaaatctatctccatgccggaaaagaaatggcgtgccgctttgaaacaggatgctgccagcattattcgcacggcacatacgctgatgggagttccgtatctttgggcaggcacttcttccaaagggatagattgcagtggcttcatgcgtaccattctttttattcatgatattatcattccccgagatgcttcacagcaagcgtatgtaggcgagcatattgatatcgctcctgattttagcaacctgcaaccgggcgacttgatcttcttcggacgtaaagctacggcagatcgtaaagaacgtgtggtgcatgtgggaatgtatattggcaacaaacgtttcattcactcgcaaggtgatgtacacgtcagtagttttgattctgccgatgagctttttgatgaatataacctcggacgccttctgtttgctacgcgcgtgctaccttatataaataaggaagcatccttgaatactacggaaacgaatccttattataaataataaagttacgaactacaagcttcaagtaacaatgctctcattctgcaaagctcttgtagcttgtggctccgtagctagtagctcctaacttaaaaaaaaatattatgcaaaacagaagagatttcctgaaaacagctgcttttgccgcattgggctccggtgtggttatcaatgatgtgtttggaggagaaagcgctccaaaactgttcaatatcaataaaagtggtgtgaatgccaggatgaaattgcgcttctttccatatgagttgaagttacgtcatgtctttacagtggctacttactcacgcactaccactcctgatgtgcaagtagagattgaatacgatggtgttatcggttatggtgaagcttccatgccgccttatttacagaaagaactgggtacgatggaaagtgtactggctttcctgaaaaaagttcaggatatcatcgggcagtttcccgatcctttccaattggaggatattctcgcttatgtagataagctttcaccgggagatgccgccgctaaagctgctgtagatattgctttgcacgatcttgtgggcaaattgctgagagctccgtggtataagatatggggattggataaggaaaaagctccttcgaccacttttaccattggtatcgatacgccggatgtggtacgagaaaaaacgaaggaatgtgccgagcaattcaatattctcaaagtaaagctggggcgtgagaatgataaagagatgattgaaacaatccgttcggtgaccgacctgcctattgccgtcgatgccaatcaaggttggacggataagcattatgccattgatatgatacaatggctgaaagaaaaagggattgtcatgattgagcagccgatgcctaaaacccagttggatgatattgcctgggtgacacaacagagtccgttgcctatctttgctgatgaatctttgcagcgtttgagtgatgtggccggtctgaaaggtgcatttcatggcatcaatatcaagttgatgaaatgtaccggtatgcgtgaaggctggaagatggtgacattagcacgtgctttgggtatgaaagtgatggtgggctgtatgacggaaacatcctgtgcttgctctgctgctgctcagttttctcctgcggttgactttgctgatctggatggcaatctgcttattgccaacgaccgtttcaagggaatggaggtcgtaaagggcaagatcacgttaccagatttgcctggcatcggagttgtgaaactttaaggatcctgaatcgtaattctatttccgttctcaattatcatctataaattagcttattatgaaaaaagtattgtatgctgctgccttgcttttccttgtgactgcctgtactctaaaaccggaaagcaagccctatacctgggaagatgatctgcaccaacgcctcctcactgatttctctcgtacggaagatgaagtgaaagagtatattcgtaagtatatccctgatgttgccgatgagcaaatgtgccaatgggaagcctccaaagcattggagtgtatgactctggatggtgagaagcgttatttccgtaatgccgcgcctaatttattccgtgtagactctgtctgctatcagataaaggctgccaaagatggcgtctccttcagtggcagtgaaaaagtaaatatggagaacctgcccgaaatcattgcgagtgtgaaaaagagtggtaatcctatcactgctcccaaacgaatgcgaatcacctatacgctcacggtagacagtaatgccgttcctgccggagagctcgttcgttgttggcttccttacccacgtaccgaccagtcacgtcagcaagatgtaaaattcatctctgccagcgaatccaagtatactttatccccacaggattgccttcatagcactctctacatggaaaaacgtgcagtgcaagatcaaccaaccgtattctctgaaagttttgagtatacagctaatgctgaatggcataatttgaaaccgaaagatattcagccctatgatacaacttcttctatatataaggaatatacggctgaacgtgagaagcatgtcattttctcaccacgtatgcgcgaacttgctgccaaattgacagctggggaaactaatcctttgttgaaagctaaacgcatcttccgttgggtgaatgataacttcccttgggcttctgcccgagaatattctactatagaaaatattcccgaatacgtattagataaccataaaggtgattgtggtcaggttagtttgctgtttattacgctttgtcgtatcagtggtattcctgcccatttccagagtggttttatgatgcatcctaaagcatggaacctgcacgactgggcggaaatctattttgaaggcattggttgggttcctgtagaccaatcatttggcatccctacttttgcccgtaatgcggatgaagaatatttcttcctgggtggcattgactcctggcgtatgatagtgaacagcgattacggtatgccactgatacccgagaaaaaatatccccgtagtgaaacggtggatttccagcgtggtgaagtggaatgggagggaggtaacctttattttccgaagtgggattatcacatggatatagaatatctcgataattaaagaggtacttttccctgaaaacagaccatctattttaaacggatagatggtctgtttgattttaacgcctatctgccttattttcacgtcagtaaacgtgcataaatgtaaaattgtcaggttctgtcgttaaccgctgttaagccccaaaagttcactgttaaaagagaacaaaaaagagtgacaagcggaataagtgaacgatttttgtcgttattttaacgtcgaaatgttaaacaaaacttgaatattaacaattaaaagaatagaaaattagtatgaaacagacaacaaaaaacattctcggggttgcagctatcgtacttctcagctcgggagtagcaggtttaaccacctataagatgctgcaaaaaaatatgcctgctgatagtaccagtgcattcaatgaaatgttccagcaaaatccgaacgtacgtttggcctcttataatgccgttgatgcgcaaccggtagatttgacgcaagcagcagaaaattcagttcacgctgtggtgcatattcgttctactcagacttccaaagttcaggaagtagaagttagagatccgttctctgatttctttggtgaatttttcggtggtcggggcggtacgcaaagacgtcaggtacagacccctgaacgtacaggctttggttccggcgttatcatctctaaagatggatatatcgtaacgaacaatcacgtaattgcaggtgcagatgaaatcagtgtgacgttgaatgacaatcgtcaatttaaaggacgtattattggtacggatgaagagacagacttggctctaatcaagatagaaggtgatgattttccaactattccggtaggtgattctgatgcactgaaagttggtgaatgggtgcttgcagtaggtaacccgtttaatctgacttctacggtgactgcgggtattgtcagtgctaaagcacgctctttaggcatgggtcagcaaactggtaagcagagtatcgagtcgtatattcagactgatgctgcaattaatcaaggtaatagtggtggtgcattggtaaatgctcaaggtgaattgattggtatcaacgctgctcttttctctccgactggatcaaatacaggttatggttttgccattcctaccagtattatgaagaaagtagttgctgatttgaagcagttcggtacggtacaacgtgtgaaattgggtgtgagtgtaacagcacttactgaagagccgggcgacacacaggttgctgataaagctggtaagaagttgagtgatataaagaaagaagccagagaaaaatatggtgttattgatggtctttgggtacgtgaaatcgtagagggaagttcagcttcaggttctgatattaaagttgatgatgtaatcattggcatggatggtaaggctattcataaatttgccgacttgcaggaaatcttggcaaaacatcgtccgggagataaggtacaagtgaaagtgatgcgtgataagaaagaaaagaatatagaagttacgctgaagaatgaacaaggtactacgaagattgtgaagaatgccgatatggatattcttggtgccgcattccgccctgtacccgatgaattgaaaaaacaattgaatctgggttatggtcttgaagtaacaggtgttagcaatggtaagatggcagaaggtggcgtccgtaaaggtttcattatcctaaaagtgaataatataccgatgaagactgtggaagacttggagaaagtgatgaaagaagctgctaagactcaggaataggttttgtttattacaggtatgttcccctctggaaaacgtggcagctatgcagtaagtgtcgctcaggattaatggctggcattgctaaattgtagattgtacatgtgaataggtaagaagattgtaatattagctaacaaagaagaaaaagggtgtcgacaactaacttgtcggcattctttttgtttatattgtatagtgaataagataaaaaagttagggcaagtttgcttgtaacaaaataatttgtcgtaactttgcaacccaaatctgttttagaagaatgagacaacttaagattacaaaaagtatcactaacagagagagcgcttctcttgacaagtatttgcaggaaatcggtcgcgaagacctcataactgtcgaggaggaggtagagctcgctcaacgcatccgcaagggtgaccgtatcgcactggagaagttgatacgtgccaatctgcgtttcgttgtatctgtggccaagcagtaccagaaccaaggtttgagtttgcccgacttgattaacgagggtaatttaggactgatcaaggccgccgaaaagttcgatgaaacacgtggtttcaaattcatcagttatgcagtatggtggatacgtcagtccattttgcaggctttggcagagcagtcgcgtatcgtgcgtcttccgttgaatcaggtaggctcgctgaataaaatcagtaaagcattctccaagttcgaacaggaaaatgaacgtcgcccgtctcccgaagagttggcagatgaactggaaatccctgttgataaaatctccgatacgctgaaggtatccggacgccacatttcggtggacgcaccttttgtagaaggagaagacaacagcttgctggatgtgttggtaaacgacgactctcctatggcggatcgctctttggtgaacgagtctcttgcgagggaaattgatagagcactttctacgttaaccgatagggaaaaagaaatcatacagatgtttttcggtatcggacaacaagaaatgacattagaagaaatcggcgacaaattcggtttaacccgtgaacgtgtgcgccagattaaggaaaaagcaattagaagattaagacaaagtaatcgtagtaaattgctcaagtcttatttaggataagtaagaaatatcaatttccgacaaatagaaggaattaaaaaccggtaggtcatgatctgatcaccggtttttttgttatcattattataaaagtgaagataagctgtatctcagcataaaaaatgaatgaattctttttattttgctctcggtttgcattatctttgtcgccaacaatatataataaaaaaaagattatgaaatacgttcgtatactttttgctgtagctttagtttttatggtatgttcagcattctcattcaagaagggtaaaggagaaaaagctgtgtatgcatttggtgttgctgcctctttcaacgacacggtagtgtattttaccgatattcaagtattggacagcgtgaagctggataagggtggcttcttgcctaagcgtgatctttatacgtatcagttgaagaattatttggaatatgatttgaaatctcttgattatacgtgtatgatctacttttctgaaaataagaagaagttagaaaaggaggctgcaaaagtgaagagcaagtataagaagaataaaacgatagtattgatgcctattgctcctgaagctttccgattcaagaagccggaagagtaatttgttttatttccttaagaggttaaggaatttacttaaataatagaccgtagtcatgaaaacgaaactttacttctttttgtgggtttgtctttctacattgctgattgcatgtgaacatgaggaatcggatacgtctttcaaaggaactcgtacgattcttgcgtatattgcggcggataatacccttgcttcatttgcttctttggatttagcggagatgaaagcgggtatggcgaaagttcaagattctaatgtgcattttctggtttatatagatgatggtaaatctcctcgtctgcttgagctgaagaatgaaaagggggcagtagtggaaacggtagtggaaacttatggaagtcgtaactctgtaggtgtatctgaaacgcaggaagtttttgcaaaagtcttttcgaattccaaatatcaggctgacagttatggattggtttattggtcacatggtgatgggtggctaccttatccgttgcgcgctggtactcgttgggtaggccaggataaaggtaatggtgataatagaatgaatatctctgaatttgttgagatattaaagtctgctcctcattttgattttatattgttcgatgcttgtttcatgcaagcagtggaggttgcctatgagttgcgtgattatacggattattgtataggttctccgactgaaattccaggtcctggtgcttcgtatgatgcagttgttcctgctatgttttctgctgagaatgcggcagtgaatattgctaaggcttattatgaaccttatgcggctaaatatgatgaaggtaaaggcttgtcaaatagtaattggacagcgggtgcctctgtgtgtgcgttgagaacagataaattggttgatctggcaagaataacgaaacaggttttgcctggattagttgataatgcgcaattgcgcagtttgatttttgattatgataaacgtcgtggttctgatggatttcaggatggtcatgtaggttattatgatatggcaaatatgatgaaaaaaatcactgataatggtggctatctaacgtggaggcaggcttttgatacagctgtagtatattgggcgactacttctatgaattattctgcttatattggtatgttttctatggaaggcactaacggagtgtcctgctatattccttcagtatctaatactgttactgataaaacatatcgctctactgagtggtatacatccgccggctttgccgcattaggctggtaatattttctttttaatatataagtgtggtgtttgagcctgtaaattagcctcaaaccagatgtctgtgtctcttcttatgcgcctaaattaagggtatatgaactttctctctttgaatatataacatgcttctaatggacttaatgtgcgctattacgttgttatattgtgatttaacattattttccattggaaattattttgttttagaaaatattcttttctttgcactatcaaaactaaaataaagaagtatgaagtatataattattggaggtgttgccgggggagctacggcggcggcacgtttaagaagagttgatgagaaatctgatattcttttatttgagaaagggaaatacatttcgtatgcaaattgcggcttgccttattatataggtggtgtcatcgcagagcgtgagaaattgctggtgcaaacgccgacttctttcggccaacgctttcgtgtagatgtacgtgtggagaatgaagttatcgctattcatcctaaagataaaacgattactgttcgcactgcagacggtcgcgaatatgaagaaacctatgataaacttttgttgtctccgggtgctacacctgttcgaccaccactggaaggtatcgattctgaaggaattttcactctccgtaatgttgaagataccgatcatataaaggcttatcttacggaaaactccgtaaagcgagcggttgtagtaggtgcgggctttattggactggagatggcagaaaatttgcatcatgccggagttgccgtatctgttgtggaaatgggtaatcaagtaatggcgcctattgatttttcgatggctgcgcctgttcatcaacatttgatacagaaaggtgtgtcgctctatctggaagaaggagtaactcatttccggcgtacagaacaaggtattaccgtctttttgaaaagtggaaaaacgattccggcagatatggtattgctttctatcggagtacgccctgcaacggctttggctaaacaagccggactgaggataggtgaagcaggtggtatctgggtaaatgaatatctggaaacttctgcaaaagatatttatgctgtaggggatgccattgaatatccgcatccattgaccgggaaaccgtggttgaattatctggcaaatccggctaatcgtcagggacgtattgtggctgataatatggtatttggtaataaggttgcttacgaaggtgctatcggtacttccatcgcaaaagtatttgatatgacggttgcttctacgggacttgctgctaagcgtctgaagcaatgggagatggaatatcaaagttctgttactcattcgtcttctcatgcagggtactatccggatgcattacccttgactttaaaattaacatttcatcctgttacgggaaaattatatggcgcgcagggtattggttatgagggtgtggacaaacgtattgaccagattgccggcttgatcaagcgtggtggaacggtatatgacttgatggaaacggagcatacttacgctcctccgttttcttctgcaaaagatcctattgctattgccggatatgttgcttctaatattatcagtggtgcaatgcctgtcgtaacttggcgagaactggtacagcataagaatgaagtaatgttaatagatacccgtacggctgaagaattttcttttggaactattccgggagcaattaatattccgttggatgatttaagagagcgtatgctcgaagtttctactgacaagcccattgtattgttttgtgctgtaggtttgcgtggatatctggcacagcgtatcctgatgggaaatggatataagaatgtgcgtaatctttcgggaggatacaaactgtattctgctgcggttgctccggtaccggtaccttctatagcggctacttcagttgatgctcgcgtaacttttggctctactgaaacttcgggaactgttgtgcaatccgattctatattatcagctggaggttcatctaaagaaccattgaaaatcaatgcctgtggtttacaatgtccgggacctatcatgcaagtgaagaaggcaatggatactcttgaaccgggagaacaggtggagattgtggcaactgatgccggatttgcacgtgatgcttctgcctggtgtgatacgacgggtaatcgtttggtggggagccatgaggataaaggacgttatacggtagttatagaaaaaggtaattcgaatatggtctgcccttcttccaccggaactgtagcagcgggtaggggaaaaacattgatcctttttagtgatgatttggataaagctttagctacttttgtattggcaaacggggctgcggcaaccgggcaaaaagttacggtattcttcactttctggggattaaatgttttgaaaaaagtgcagaaaccgaaagtaaagaaagatattttcggcaggatgttcggtatgatgcttccttccagttctttgaaactgaaattgtctcagatgaatatgttcggtgtgggaagtcgcatgatgcgctttttaatgaagcgtaaaggggtagattctttggaatcacttcgttcgcaggcgcttgctcaaggagtggaatttatagcctgtcagatgtctatggatatgatgggaatctgtcgtgaagagttgttggatgaggtaactatcggtggtgttgcaacttacatggagcgcgcagataaagccaatgtcaaccttttcatatagttatttgttatttaacgaataaagaagaaaaatatatggaagacttatgtaaaatacgtgatgtttaccgggcgatagctgagtttgaaacccaatttatgcagcaatacaatctttcgctgaatgaaggaatgttactctgtacacttctgaatactccccggcttacttccggggaaatagcagaagccttgggattaacttgttctaatacttccaagttgatacgttctgtcgaagaaaagaagttaatagcccgtattattggtaaagtggataagcgccaaatgcatttttcattgactgcagaaggaaaagaacaaatcactgcgatcaaaagtactactcatgagatgcctgaactcttacagcaaatggtgggtttgctggaaaaatagaagatggagatatttttatctccatcttcaaaattattaaaatttttcgtggattttgcttaagattgctttaatttgcagctaatatattaagcattatagcaattggatatgcaaaaattattatccttgccgcctaatcttgtgtcggcattctatgaattggaaaatgtagaccgtacggaatggttttgtacatctgaccctatagggatgaaactggggtcgggtggtggaaccacttggcttctgcgggaatggtatagaaaccagcaaacagaacactcaacagagaaacgtattctgctgcatgccggtggacaaagccgccgcctccctggatacgctccctccgggaaaatattaactccgatacctgtatttcgctgggcacgtggacagaaattgggacagaatttattgtctttgcaagttccactttatgagaaaatcatggaacaggcaccggaaaaactgcgtactttgattgcgagtggagatgtgtatattcgtgctgagaaacctttgcaggacataccggatgcagatgtggtatgttacggactttgggtagatccggtattagcgacacatcatggagtgtttgtttctgaccggaaacaaccggaagcattggattttatgttgcagaaaccgtcattgcaggaactggagaatctttccaagactcatctcttcctgatggatataggaatctggttactgagtgatcgggctgtagagctattgatgaagcgttcgctgaaagatggttcgggttctgatttaaagtactatgacttgtattcagacttcggcttatcccttggtaatcatccacgcattactgatgatgagttgaataggctgtctgtagctatattgccattacccggtggagaattctaccactacggcacgagtcgtgaactactttcctcaactgttactttacaaaatagggtgtacgatcagcgtcagatcatgcaccggaaagtaaagccaaatcctgcaatatttgtacagaatgcagaagtaggtatctctctttcttccaataatgataacctttggattgaaaatagctttgttggtacatcatggaagataggttcccggcaaatcattacgggagtaccggaaaatgactggacgttagaattaccggatggggtttgtatagatattgtgcctcttgcagagaagcattgggcagttcgtccgtatggtttcgatgatgtatctaaaggagatatccgggatgaaaaaactttgtatctggggacttccttccctgattggttagcggagcgtggactgactccggatgatgtaactggaagaaaagatgacttacaggctgccggaattttccctgtggtagaaggtgttgagcagatgggcgaagtacttcgctggatgacttcggagccggaattgacagaaggtaaggaaatctggctgaacagtcaacgtctttctgccgatgaaatctcagcgaaagctgatttacgtcaattatatgcccagcgcgagagtttccggaaaggtaattgggagttgctggcacgcaattatgagaagagtgtcttctatcagttggatttggctgatgttgccgaggatttccattgtttgaagatagataaaccggatgtgttgccggctgatgcacctcagatgcagcgtattcataatcggatgcttcgggctcagatagataaactgaacggaaaagactttcagaatgatgaaaaagaggctttcggattactgcgcgaaggattactttctgatttatatgaaaagaaaagcagcccatatctgaatgtatacagcgatcagattgtttgggggcgcagtcccgtacgtattgatgttgcaggtggttggacggatactccgccatattctctttttgccggtggaaatgtagtgaatctggcgattgaactgaatggacaacctcctttgcaggtttatgtgaaaccttgcaaagaatatcgcgttgtgttgcgttctattgatatgggagcgatggaagtagtgaatactttcgaggaattgcaggattactgtaagataggttctcctttctctattccgaaagcagcgttgacattggctggttttggtccggcgttttcagaagtggtttatccttcgttggagaaacagttgcaggcattcggcacaggtatagagattactttattgtctgctattcctgcaggctcgggcttgggaaccagttctatattagcttctacggttttaggctctttaagcgatttctgtggcttgatgtgggataagaatgaaatatgccgtcgtacacttgctttggaacagttactgacaacgggtggtggttggcaagatcagtatggcggagtgttacaaggcatcaaactgttgcaaacagaacccgggtttgtacagaatccgttaatacactggttgcctgaacatctctttacgcatcctgaatatcgtgactgccacctattatattatacgggaattacacgtactgctaaaggtatccttgcagagattgtgcgctccatgttcctaaactcatctgcgcatttggctatattggaaaatatgaaagcgcatgcattggatatggcagaaaccattcaaaggaacgactttgaaacctatggcgcattgattggtaaaacgtggatgcagaacaaagctctggattgcggtactaatcctccggcggtagaagaaattatcaataagattaaggactacacactgggatataaactgccgggtgcaggtgggggaggttatttgtatatggtggcgaaagatccgcaggctgcattgcgcatccgtgagatactgacgcaggatgtaccgaacccttgcgcacgatttgtagaaatggcgttgtcgggaacaggattccaggtgtcaagatcttaattaagatcgttattcgtgatggtaaggaccgccattgagtatattcatggcccggtataactgctctacaaaaatcagccgcaccatctgatgcgagaaagtcattttagaaagggacattttctcatgtgctgcctgatatactttgggtgagaaaccatacggtccaccgataacaaatacaagccgtttatttacggtgttcatcttgcgcttcatatagtccgcgaactctatggagcgcatttcttttcctccttcgtccagcaatacaatcacgtcgccaggctggaatgccttgcatatcaattccccttctttttctttctgaacttccattgaaagacttttcgtattcttcaattccgggataacttccatttcgaaggataagtagcgtttagtacgctgtacatagtcgttaatggcagttataaagtgctgttctacagttcttcctacgacgagtaatgttgttttcatgctgcttacattctgatttgtgcacaaaattagcgcttttttattgtattttacaataaatgcttacctttgcgtatcattaatacttgtgattatgaaaaaacgagtagttttattgttgacctgcctcttcttatgggtgtcctcgatctttgctcaggacgtacctgtgggggtggttgtggccttcaagaagggaaactctcaggaactaaacaggtatctgggtgataaggtggatctgattatccataatcgcacgaccaatgctgacaagcaaacggcagaaggaactatggctaatttttttgccgagaacaaagtcagtagcttcaatgtgaatcacgaaggaaagcgggatgaatcaagtttcatcatcggcactttgggaaccgcaaatggaaactttcgagtgaattgtttcttcagaaaagtacagaacaaatatgttatacatcaaataagaatagataaaacgaatgaataaggaagaagaactgattgacaggctgatagatctcgcctttgcagaagatataggtgacggagatcataccaccctttcgtgtattcccgctacggcaatgggtaaatccaaacttttgattaaagagccggggattctggctggtatcgaagttgccaaagaagtgttccgtcgtttcgaccctactatgaaggtagaagtcttcatcaatgatggagctgaggtgaagccgggcgatatagcaatggtagtggaaggcaaggtgcagtctctgttgcagacagaacgcctgatgctgaacattatgcaacgcatgagtggcattgctaccatgacgcataaatatgctgagaaactgaaaggtacgaatacgcgtgtgctcgatacccgtaagactactcccggtatgcgtatccttgagaagatggctgtaaagattggtggtggtgtaaatcatcgcatcggactgttcgacatgattttgctgaaagacaatcatgtggattttgccggaggcatcgacaaggctatcaatcgtgctaaagaatattgcaaggaaaaaggtaaagacctcaagatagagattgaagtacgtaacttcgatgaattgcaacaagtgcttgatcttggtggcatagaccgcatcatgtttgataacttcacgcctgaaatgacaaagaaggctgtggatatggtaggcggtcgttatgaaactgagtcttcgggtggtatcactttcgatacgctgcgcgattatgccgaatgtggcgtagactttatctctgtaggtgctctgacccattctgtaaaaggattggatatgagttttaaagcatgttgacaaaggcgaaaggctgtatttagaaaatagcaagaagcctctcataagtttgccatcatattgcaatcttaatgagaggcttttttcatagatacttggaaagtatggaaaagatagattggaatagggtaaaaactactatcagaaattggaagcctggcgagtatatacggcaaacttctattgttgtgatcggtgtgctgataaccttcgttggcagtgaactggtgactcgttgctcagagcagaaagacattaaatctactatgctgctgattagggatgaactgaaaaacaatcggaagaacttcgaaaagattgtgtctgagttcagtgcggatgaacgcctttccgccttgttggtggagcatgatatgaatgttcggaccataccggaagactcgctgaagcaatttcgctattctatggggcaaattcgtagttttttttatactcggaatgcactggatattctcaaaaactctatgctgatgcagaaaatatctgataaagagtttttgctttcattgattgatgtttatgaggcattggaaggggtcaaattatcaatgaatgggtattatgatatgaaggaaaatacggctattcctttttatttgactttgactgatgaacagacaaatatggttaatgagggaaaatgggaagcatgggagatatatctttcagataggaagctacgaaactttctgagaattccacagggatattttattcccggctataaagaacgcatagagcaaaagattgatgaaatgattcaggctattgagcagaaatatggttcaagataaatacttatgggaaatatagataagataaagtctacgattaaaggctggagattgggagactatttccgtcagttcagtattgtggcggcaggtatcattgtgactttttggggaagtgataaacttactgcacatgctcgccagaaggaagtacagtcggtaatgcaactggtagcggatgaattgaaaagtaaccgtaaatcattgatgggagtaaaatctttgctggatatcgatatacacatgagtgcgttactcatagaacatagagtggatatttcaactattccatcagatactttagtcaaatataagaaattcttctctaacatgagcacattcgattatagtacggatgcactggatgtgttgaaaggttcttcgctgatgcaatatattcctgataaacggttattgcaaagtatattgcaaacttaccataagatgggaaagctacaaaagaatgtgactgagtattatcagatgaaaaatgatgcggtaatgactcatttatcttctataaaaaaagaacaccgtcttaggattatcagcagtaaagggaactttgaagagaatattctatccttactgaataatgatacatttgttaattatacggctctagttccgaattttctggactgggaagagtttagtgatttggaacaagtgttgggagaacaaatacgaattatagaagcaaagtataaataatctccattctttaacttctttttagatataacattgcagcattctacggaaagctgcgtctaactaacaaacgacgcgaagaggcgtccgtaaaaaatagcactgacattggaaaatgaaatagaactgatagagggctgccgggcaggaaaggattccgcacgtaaggaattgtataccctttattccaagcagatgcttgcggtatgctaccgctatacgggcgatgaagatgccgcgcatgacgtactgcacgatgggttcatcaaaatctttacccatttcactttccggggcgaatgtgcattggcaacgtgggtgacaagagtaatggtgacacaggcaatagattatctgcgaaagcagaaacgcatcacccaactggtggtgaacgaagaacaattgcctgacatacccgacgaagcaagtatagccgatagcggtagccgcctctccgaacagcagttgatggcatttgtggcagaattacccgatggatgccgaaccgttttcaacttgtatgtgtttgaagagaaatcacacaaggagatagcggaaatgcttggtattaaggtacattcatccacctcgcaactgcatcgcgccaagaatttgttagcaaaaagaattaaagaatatacagagtatgaaaggaaatgatgaaataaccggtttgttccgcagtcgcctctctggtgcagagatgacggtgcgggatggcttttgggaggagctgaaaggcgacctgtcaagagttgaaaccgatgcaaccaatacttctgcaactgttgctttcggacaggcggggaacttgtctggacagaaacagaaacgttctgtccttactccacgcttctaccgggtggctgcggcggcttctgtagtattagtgcttggagctgcttccgctgcattctggtacttctctccgaaagatgagattcaggaagcattcaccaaggtggctacactgacaccggaaggtaacttgaatggagatgtggtgcaggaaaagttcccctctattcatgagactaaacctacagcgcaaaatcctggtcataagaatcctgtaccagtatcatccggaggcatacttgctgcgaatggtgatgatgaagagactgtatcagtcactgtctccattacaatttcccaacgcgtatatggtaatcaccaccaaggtaacggaatgtatggtcaaacagcttcatcaaggaatgaaaataatcatcatgccacggctactgatcccgctgccacaaattcagagcttggctcagattccgataaggcgctccccattaccaatgcgggtggttctgctaaaaaatgggctttcaaagcaggtataggtacagcgttgccaaagggggatttcgggatgccgttcaccgcaggagtttctgctgaacgtcgtttgaacaaacatttttctctggaggcaggtttgcaatacaaccgtcttgacggagaccatacgatacacacactggctgttccggtaaaactgaatgcggtgctggcaagcaattctaaagtagacttttacgctacattgggtggtgctgccgagaaatgcatagccggagccggggacaatggttttggagcggagcctatacaactttccattgcggcaggtttgggagtccgttataagttgaacgaccggattgctctgtttgcagagcctacggtatctcatcattttgatacggattcgcaaacaaaaacgctgcgaacggaacgtccaacgaaccttaatctactttgcggtgttcgtatgacatattaaccttaatacaatgcaacaatgaaagcaatttctaatatacgtgccgtaatggccattttgatattcttcttttctctttcctttgtatcatgtacggaagagacgttggactacaataatcctgacgtggatttattcgtcaagcaactaaaagctggaaaatactctgtcgaaagtccggaaggtctgaacactattccccggtttactgttgatgacataggggacttgttgaagtatgccgaagatttgacggtaattccttctttcccattggctccggtttcttattccgcaggtggcaagcttcgtttaggtgagtgtattttgtggacagtagaaacaatccgtctggggcagaatgcttcgatggggtgcaaaatggtacatgtggatgcagagaattatgaaggcatttacttcttatcggatgatgaagttctggatgcttccgcccgttatcgccgctggtgggaaaaccgcaaatacccccgtacgatgtggaccatagacccttgttatgatgaaccgctttgtggaagcggatatatgtggtggtaagaaaataaataaatgagaaaatattgcactataatcggactgcttttagtagtagtccttcccgtttgcgctcagaactggacacctcaggactctctgcgattgcgccgtctgctggatggagaaggagagattaagctgaatccggaagttctgaaagagatgggagtacaggaacctctgggtaaacagcagatatcgatggagaaacaatggctggatttcaacacaacacttcccgaaataccaaatacaccgaagaagaaagttgttcttaccttgcgcccgtatactgcaactacgaagtacaattgggacccggtgtatcagaagaagattaaaatagataaggacacgtggcgaggggatcctttctatgaacttaaaatacttcgcatttattccgattgggcaaagacgcctttcgaaaagggtgtccgtaaaagtatggatgaaatagaggcaaccggaatgcgctaccgaatgacagaacgggctaataatatggctgtaggtagctggcagggtgctagtggcggtatgggattttccggtgattttatggcaccttttaccaaagaattctggaacgtcaaggggcgtaagcgccgtgcccgtacgctggaagtgttacgtgcatacggagactcggtaacggtacggggtaaagaacctgtcaagacgattaagaattaaggatttgtataatttgaacatccggtgatatgtatgttgtaaattcgtatttccgggtgtgttttttattacaattcgccttttcttccgaacctttcatccttttttcttgtttcttcctaataatccctaaacggaaaaactatgaacagaattacttcccttttcggaattcgatatccaataatccaaggtggtatggtttggtgcagtggctggcgcttggcgtcggcagtaagtaatgcgggtggactgggcttgcttggggcaggttccatgcatcctgaaacgttacgtgagcatatccgtaaatgccatgctgctacacataatccttttggagtcaatattccattgatgtatccgcagattgaagaaatcatgcagatagtggtagaggaaggagtcaatatagttttcacttccgccggaagccctgccaaatggacgggatggctgaaagagcggggagtgacagtggtgcatgtggtcagttcttcccgctttgcgatgaaagccgaagaggcgggtgtggatgctgttgttgctgagggcttcgaggccggtgggcataacggaagggaagaaactaccactttgtgcctgatgcctgccgtgcgtgctgctactaccttaccattgattgctgctggaggaattgctacgggtgaggctatgcttgctgcacgggtgttgggagcagaaggagtacaaataggtacgcgttttgcattgactcaggaaagttcagctcatgaatatttcaaggaatattgtttgcgtttgcaggagggggatacccggttattgttgaagaagcttgctccggtacgtttggtgcggaataatttccgtgacgctgtagaggcagccgaagccgtgggggctacacaagatgaacttcgtattcttctggctcatggacgtgccaagaaagggattttctatggagatctggaagaaggagaactggagattggtcaggcttctgcactactttatggtaaacagatagagacggttgctgaggtgatgcaggaacttacggaaggatatagaagagcgtgggatgcgctaaaggaataagaatttagctatatgggacgatgaaattcgtcccatgagatgaaaaaatctgtatcatgaggcaaaaataaatgtctcgtgggtcgaaaagattcatctcatgggacgattttttttgaattgggggaatgaaatggagtcatttcactttcttaccgtccaaaataaaaaatggggctgtacgtcaatctgtacagtcccatttttatgttttccggttgtatccctatgatttaggtgtaccggaattatttgttgtactagttggatttacggtaggatttgcagttggtgttgccgtagctgtgcttgttgtgcctgctgctgttgcagtggctgttgctgcgtttgctgcaacttttggttgttcttcccaatggaagggtttgaagttagtattcggatcaacccaagtcggtttcttgcaagcgtaaatgatgaacggagctgccacaacaacgatggcaccgataatcaatacggagaaccaaactgtattgctacccgttgaaatctggctgggcgggataaagctcaggatgaatgccaacagagaaccacagaaaccgagtccgccgatgaaccacatcaatccattaccacccttaccgatacggaacggacggttcaacttcttcatcttgtaacgcaatacgatagctcctgtaaacatcaacatatacatgataaggtaaagaactactgtcaactgtgacaggatctgatagaagctctgtacggaaggcattactacgaacaagaggctcaatactgttacagcaccaccttgtacgaacaggatgttcttctgtacacccagtttgtttgtcttctggaagaacggaggcatgtaacctgccttacctacggcaaaaatacctttagacggaccggcaacccaagtcaatacacctgccagcacaccgaatgcaagagcaatagcgatgatcggtgataaccaggaagcatggatgtacttgaagtaattgtcgaaaccaaccagcaagctttgtgtcagactgatgtctttggccggaatgataacacccagtgcgaaagtacccagtacgaaaatgataactgtgatagctgcaccgataaatactgctttcggataattcttggaggggttttctatatccttaacgtggataccgcccatttccataccggcataaaagaggaagatacttgcggcgagtacgacgttgtcgaagttcgtcagatcggggaagaagctgctgtggaaatccagattggagtgtccgcctgtagccagataaatgatacccaggataatcagcaaggctgccgggataatggtaccaaccataccgccgactttggcgaccttacctacccatcccatacctttcaatgagatgaaagtggcgagccagtagatgatgagcactacggcgagtgtgtagtacttgttacttgccaacgacatatcgtgtgcgccgttcattccaatgaaggcgatggatacagcaccgaatgtcaatacggtagggtaccagatagtactctcaatccattgcacccagatggcaaggaaaccgagccgcttaccgtaggcttctcctacccagcggaacacaccaccttgtttgtcctggaacatcgcagccaattccgcagcgacaagtgacgtcggtataaggaatacgatagctgcaaataaatagtaaaaggccgaactcattccgtacacggcctcggcaggtagtccacgtagggatactactgccgttacattcatgattgcgagggtgaacacacccagcttcactgtttgtttaatatttgccataagttaaggttttaggtgaaaaatatgttttaaaatcagtctctataacaacgacccggtggagttgttttcagggataaagtgaaagttggtaaattaacacttaaacaaatgtcttgtgcaagacgttttagggcaatcgggcagaaatcaataatatattaaatcagaataaataataggtattattatgaaaatggctctttcagaatttgcattacgagagaagggaatttatggtgtcttacacattgtgattctgttactttcgttatttttagtggttagtatttcagtagatacattcaagggtattcctttctatactcagacggtatttatgaaggttcagtttgccgtgtgcatcctgtttttgctggactttattttggagtggtttttagcaaagcataaaggacgttattttgctactcacttcgtttttcttctggtagccatcccttaccagagtattatttcctgggccggatggacgttttcagaggaaatcacttatttattgcgttttattcctttagtgcgcggtggttatgcgttggccattgtggtaggttggttgacgtataataaggcatccggtttgtttgttacttacctgacgactttgcttgctacggtttatttctccagtctggctttctatgttatggagcatggggtgaatacattagttacgggttatggagatgctttgtggtgggcgtttatggatgtaacgacggttggttccaatattattgctgtgacggtgacggggcgtgtactgtcagttctgctggcagcattggggatgatgatgtttccgatatttacggtgtatgtgacgagtctggtgcaaaagaggaatcaggagaaacaagagtattataaggagttgcagggaggggatataaagtaatgttgtgtgtgtgtactttttctttcggcttgtcccgaaagaaaaagataccaaaaagaaagggaccccggctacgtctccggtgctactccgacactgccattcgcagacggggctcaaactcgcttcgctcagacagatcgccccttacctgcgcctgacagtgcctacgcttacgcacctacgcctatgccggagggctgcgcggtggggtgctgcgctatggcgatggttatgtgctggaggtattaatttatattggtgcggtaatgagctatattcccattaggactgaacgtacttcccactacgactgaagccacttcccactacgactgaactagtgttccactacgactgatcttagtggaacaccaagtagactatcacacaagaagttatattcttcagttcactcctaatataatgcatattggtatagtaatgaatttgctcaccacagattaacacagattctcacagagtttaattaattaaaaatcagagaaataaaattctgtggaaatctgtgctaatctgtggtgaattgattcataaccctatagaaatgaattaatttagctgatagcttctatagtttacaagccgtatattgagtatatataagtacaggcgccgcctatcctctccggactgacgacgccttttatttatgaaaaagagagattgtcttattctacaatagtcacacggtcaccattgaacacgcccaaacctaatttgttcatgatatacttgatggcgagctgtgatttaacagaattccctgcttcgtccaaaggaggtgcaaatgcagctgcgccgaatacaccgggcagtacagacataactccaccacctacaccgctcttggcaggtataccggcagtgtacatccagtcacctgaatgttcgtagaaacctacggtagaaatcatggaagtaatcttcggagctaatgaagcttcaaacacttctttcttggtgacagggtttacaccactgttggcgatggttccggcagcaatcgccagttgtccggcagtgatgcctaatgaacattgacgagtgtacaggtcgagtgccatatccggattatcgtagatacggttgtagttcttcagtaaccatgcaatagagcggttgttgaagttcgtagccgtttccgatttatacagctcatcaatcaattgtggagctgaaccgcacaaatcagtaatattctgaacgatagcttcccatttcttatctgaattgcccacaggctcaaccatggaacatgctgagatggcacctgcatttaccaatggggtagaagggtgatcattctccaacaaaatggcgatgattgagttgaaaggtagtcctgtagcatctgcaccaatcatatccagcaccttctgtgctccgtattgacggaggatgaggatggctgtatgtactttggaaacagattctataccgaaacggtagtcagtgtcacctatattaatggtttgtccgttcatcagacagatgctgataccgaacagattcttgtcgatgttggcaaggtaggggatgtaatcggcattttttcccccggtgttacccttcacctgttcataggcttcctgggcaacctcttttagttgagagattgaaatctttttatccataagttttctttttagaattggcaaggggacgaattggcttgtccccttgttgattggttcccttaattatttcgctgctttgtgagctttacaaccgtgattgaacactttagcttctactggcaagttcttttcctgagccatgcgggtaggagtaggataatccaatttttccagttcagtgatggcattcttgatgtcgcccagcagcatgtctgccatgtcgcggctgaagccctggcgtactaccacacgcattacgacgtagtcgtccagtttagaaggcagagtataagccggtaccatccaaccatgttgcgacagtttatcttgaaggtcgtacaacgtccatttagcattcttggcgtactccggtttcatgtaccagatgaacaacgggttcaccacttcttctgaatagttgacgaacggttccatcttagcgatttcatcatggatatacttcgcgatggtcagtgagttatactgtacctctttgtatccttggaatcctaagcgaatgaattggtagtactgacccaggatttgagcagcaggacgggagaagttcaatcccacctgagtaatgtttgcacccagatagtttacactgaatgacatttcttcgggcagatattctttacctttccagcaaacccaacccagacccggataaacgagaccgaatttatgtccgctgacactgatagaaagaacccacttcaaacggaagtcccatttcgtttcaggatagaggaacggtaggatgaaaccaccactggcagcatctacatggataggaatatcgtaaccggtcttggcgttgtaagcatcgagagctttgtccagtgcttctacgtcatcgttcagtccggtccatgtcacaccctgaataggtacgatacaaatggtgttttcatcacacatctttaaggcttcttccggatcaagagtagtcttgtcaagggtcaaaggtacttcacgcatttcaatctgccacaactgtgcgaacttttcccatactacctggaaacctgttgagataacgaaattaggtttatcgaaaggtttgccttgagcctggcgttttttacgccaacgcagccaagctgccacaccgcccaacatacatgcttcacttgaaccaatggccagcgcacctgttttccaagtatccttttccggagagttccacaggtttgctacgatgttgatacattttccgttcatcacggcgatacggggatattccgtttcgtcaatgtagttaatgttgatcgcctcgttcatcagcttggtggcgtaatcgtccatataagtggtaacgaaagtggccaggttcagacggggttgagtttgagcgaaagtttcgtcttttaccatctgataagcaatctcgggagtagtaggtccatcagggatcttctctaccggagagggttgcaacattctgtttgatccaaacacttctgttttggcatcaccttttctgaaatttacatcttccattttactaatattttagtttaggtttaggcggcgaggattttccccgtcgaatttcccagaacaacggcgtttgcagaggaaagttccgacgttttacatcttttggcgtttattaaagggaaggtaaatgataatttaggagtgtagttattgatattctgactatctcaattcccctcctcctccgaggaggaggagagtttaagatactcccgactgacattctctctccgttaaatgattatttatcctttcctccttttctgaactttctataaccataattgtttctcttgcactatttcaaaccctataaatatatatgtgtatatgaaaatcaataccggccggggaaccattcctcttattacattgatcggcatctggtctatctctgcattgacctctttgccgggattggctgtttctcctattttgggacagctttccactacttttccggatgcttcggaactggatattcagatgcttagttctttaccgtcgttattgattataccttttattttgttggcgggcaagttggctgagaaacgtgactttgtccgtctgttacgcgcggggctctggatgttcgccgcgagcggggtgctgtacctgttttccacaaaaatgtggcaattaatagctgtcagcgccctgctgggaattggtgcgggactgattattccgctttctaccggattgatttcccgttatttcacgggaacctaccgggtgaagcaatttggatacagttccgccattacaaatgttacgctggtggtggcaaccgctgttaccggctatctggcagaagtgaactggcatctgcctttcctggtctatttactacctttggtagccatcatactcaccatccatctgaaagacgaaaatgcggatggtgaagcacaagtcacttcatcggataaatctcctgctgatacttcttcttcggcagaaacggctgctcccgctatccccggcaagtatggtatccatgtccgtcatctgttgcaactgatgcttttctatgggcttaccacttatatcgtattgatcgtgacgttcaaccttccgttcctgatggaggaacatcacttttccagcgggaactcggggatgatgatttccctcttcttccttgctatcatggcacccggtttctttctggggcatgttgtaaagtatctgaaggaaaagacgaagttttacagcctgctgtgtattgcactggggttggcactgatatggatttctcccaaagaatggctgatcataccgggctgcatactggtaggattgggctatggtgttatccaaccgttgatctatgataaaacggtggatacggctgttccccagaaaaccacgctggcactggcttttgtgatggcaatgaactacttggctgtgctgctttgtccgtttatcgtagatttcttccaatcattgtttcatgtacgttcgcaggagttcccatttatctttaacctttgcattacgatacttgcattgatatgggcgtataggaggaagacggattttctgttcagggataaattgtaattgatcatttatacaaagaaaaggagttccataaaaacggaactccttttctttgtatttatagctacttgttatagttctatcggttcatattccagtccgaatacatccgctacagctttataagtaactttactttccactacgttcagtcccagtgccagagcgggatcgtctttacatgctttttgccagcctttgtctgccaatgccacggtataaggtagtgtggagtttgtaagtgccatagttgaagtgaatggtactgctcccggaatattggctactgcatagtgcacgatgccatccactacatacgtcggttcgctatgggtggtaggatgagaggtttcaaagcatccgccctgatctatggcaacatccacgagaacggttcccggtttcatcatcttcagcatatctttggtaatcagatgtggcgctttatctcccggaatcagtacggaaccaatcacgaggtctatgttgggcaattccatcctgatgttatgcatagaagaatagagagtctttacattctttggtaacacttcactgaggtagcgcaggcgtgtcagattgatgtcggtgatcagtacttccgcacccattccggcagccatctgtgcagcattggttcctactacaccgccacccagaattaatacacgtgcgggacgaacaccgggtacgccacccagtaatttcccttttccgccttgcggcttttccaggaaacgggcaccttcctgtgtagccatgcgtccggccacttcactcatgggggtgagcaatgggagggagtggtcttctttctctacggtttcgtaagcgatgcagataccaccgctttctatcatggcttcggtaagtattttatcggcggcgaagtggaaataggtaaataccacttgaccctttttaatcagtttgtactcgggggcgataggttctttcaccttcacaatcatttcagctgcggcatacgtagcttcgatggttggcagcattttcgcacccactgcaatgtactcttcatcaggaaaaccgctgtttgcaccggcagatgcctgtacatacactgtatgacctcttttcaccaactcggctactccggcaggggtcattcctacacggttctcgttgtttttgatttccttaggtactccgataatcataaccttgcaattttaattgggggttaaacatgtcgcaatgtagcgatttccgtgtttcggtgtacttcgggaataggtgttttacaacagtatttttatacaggttttaatctggaataatcgaatgcccctgagtttcaatattttgctcaggaggtaattcttgtatgaatatgaaatgattagtgcccataccagtcgtattttttctccttggtacttgctttatcctgtttttgcaactgtttttgtgtactgtgcaaacggcgcatagtaataatcgtaaatacgacgcctaaaatgataagcactactaagacaatgcttgcataaataaaaatagtatggctcataaacttctgtacggtgtttttaattagtttgtgctgcaaagatatggcttttggcggatcctgcaagcatattcctaatcaaatttccatccctgcgtctccttcgctgttcgtactttcctgccagggattgatactgacggtggcgttgtactaagtctacaggtgcgcatggtagtaagcgttcggatacgtactcttggttatctcaagggagagtgttcaaagcttcgcctccttcttctccttcgtttccgtcttcaggttgtttatatgcggtgcctacgctgaggcgtgtgttcatctgataggtgcggggtaccttcacggtggtgcggttgctgctgtattgggtggtgacgcttacgttccacaacccgtcggttactttggtgagaaggataaatatgagtcgctaagagctatttgtccctgcaaagataaatatttatcgggtaatatttgctcacatttctttataatctacccggaataatgtacatttgcccgacaaattatttatcgacctatatgaaacatactatattatcccttatacttctggcatggggagcgcaggcttatccgcaaacaatggagaatgtgccttccgatgctacttttacccctccttttgatttccccatcaccttctccgggaatttcggtgagatacgtgccaaccactttcatggcggattggatttcaaaacaggaggaaccatcggcaaaccggtacatgccctggccgaaggatatatttcgcgtattcgcgtcactcatggttcgggatatgtgctcgatgtagcttataataacggatataaaaccatcaaccggcatctcagtgcttttgtgggtgatgtggcccgccgtgtggaagacctgcaatatgaaaaggaatcatgggaagtggagattactcccgaaccgggtgaatatccggtgaaggcagggcaggtgatcgctctgagtggtaatactggttattctttcgggccacacctgcatctggatatgtttgaggcggatacggacgattatatcgacccgttgcccttctttaagaagaaagtgaaagacaatacggctccccgtgccgagggcattatgctctttcctcaaccgggcaggggagtagtagacggaaaccagaagcatcaggcgtttccgcttaccccaaaacaacctattactgtttggggattggtaggttccgctatccgtgcctatgattatatggacggggtgagcaatcgttacggagtacatactgttattctggaagtagatagtgtggaagtgtttcgtagtgtggtagaccgtttctcggaatatgaaaaccggatgattaattcgtggacatacgggcaatatatgaagtcgttcatcgagccgggaaatacattacgtatgctgcatgctcccaatggaaaccggggactggttgatattaatgaagagcgtccctaccgcttcgtttatacactgaaagatgcgctgggaaatacttccaaagtacgttttacgatacatggaaagcgtgcggaaataaaacctgtggagcaccgggagaagtacatttttcactggaataaagtaaatatcctgcaagagcccggtttgaatctggttatcccccgaggaatgctctatgatgacgcatatctgaattatgccgtgcgggctgacagtggagacattgcttttacctatcagttgaacgatacccgtatacctttgcatggacgttgcgaattaactatcggattgcgccgccgtccattggaagatatgacgaaatattatgtagcaagtgtgagtaatcgtggaaagaaatatagtataggtggcaagtatgaagacggattcatgaagacgacgatccgtgaactgggtacttatactgttgccattgacaccgtaccgccccaaatcactccgctcaatccaaaacaatgggggagcgcgggacgcatcactttcaaggcaaaagatggagaaaccggtatcagtagctaccggggaaccatagacggaaaatatgctttgtttggcaagcccaattccatcagtggaaatctggtttgcgaactcgatccgaaacatgtgaagaaaggggggcggcatgttgtggagatgaccgtaacggatggttgcggtaatcagacgacggagcgatttgagtttgtctggtaatggaatatattaattgataattaaaataactgaagtatgaaaagtaaaagactgactctttccgtcttatgtatggtggcagccgtagcgcatgcgttggcttgtaccaatcttattgtaggtaaaaatgcctctactgacggttctaccatcgtttcctattctgccgattcctacgggttgttcggtgagttataccattatcctgccggcgtacataagaaaggtactctgatggatgtacacgagtgggataccggtaaatatctgggccagatagagcaggctcgtcagacttacaatgttattggtaacattaacgaattccagctcaccattgccgagaccactttcggtggtcgtccggaattggtagatactaccggtatcatcgattatggcagtctgatttatttgggactgcaacgtgcccgtacggcccgcgaagctatcaaggtgatgactgatcttgtgcaggaatatggttattacagcagtggggaatctttcacgattgccgatcctaacgaaatatggattatggaaatgataggtaaaggtcctggtgtacgtggtgccgtatgggtggccgtacgcattccggatgattgtatctcggctcatgccaaccagtcccgtatccaccagttcgatatgaatgataagaataactgcctctattcttccgatgtgatttctttcgctcgtgaaaaaggctacttcactggtgtgaataaggatttcagctttgctgatgcgtatgctcctctggatttcggtgcgcgtcgctattgcgaagcccgcgtatggagctatttcaatatgtttaccgatcgtggtgaggagtttctgccatacatagaaggtaagactaatcaacccatgccgctctatttgaaggcaaaccgcaaaatctccgtacaagatgtgaagaatgccatgcgcgaccattacgaaggtactccgctggatatcagcaaggattttggtgcaggtccttatcatactccctatcgtctttctccgctttcttttaaagtgaatggtcaggaatatttcaacgaacgtcctatttctacccagcagtccggttttgttttcgtatctcagatgcgctctaccatgcccgatgctatcggtggtgtgctctggttcggtacggatgatgctaatatgacagtgttcacacctgtatattgctgtaccgataaagtgcctgtatgctactctcgcgtagatggcgccgactatattactttctcttggaattcttctttctggatcttcaactgggtggcgaatatggtttatccccgttacgatctgatgattggcgatgtacgtgcaagccagtcggagatggaaaccactttcaatgatgcacaggaaggaatcgaatcagctgcatccaagctgtattccaaagatcctgcccgggcaaaagagtttctgactaactacacgaatatgactgcacagagtacgctcgatacctggaaacgtctcggcgaattccttatcgtaaaatacaacgatggtgtggtgaaacgtatgaaagacggtaagttcgaacgtaattccatcggtcagccggctggtgtgatacgtcccggatatccgaaagaattccttgaggaatacgtaaaacaaaccggtgatcgctataagatgccggaataatacagtgtaaatctttaatgaaaatgtaggaaatttgaacttattcgcctacatttgtgtcttgtaaataacagatatattttaacctctaaaataacaatgattatatggaaaatcaggaacttatcaaacaggtaactgagaaagcccagagatggctcaccccggcttatgatgccgaaactcaggcggaagtgaaacgcatgttggagaatgaagataaaaccgaattgatagattgcttttataaggatttggagttcggaacgggtggcttgcgcggtataatgggcgcaggaactaaccgtatgaatatttacacggtaggtgcagctacacagggcctttccaactatctgaacaaatgcttcaaggataaagaacagatttctgtagtggtaggttatgactgccgtaacaatagcgacaagtttgcccggatttctgcagatatcttctctgcaaacggtatcaaggtatatctcttcgacgatttgcgtcctacaccggaagtttcttttgctatccgtcactttggttgccagagtggtatcaatatcacagcaagtcataatccgagagaatataatggttataaggcttattgggatgatggtgcacaagtacttgctccgcacgataccgctatcattgacgaagtaaataaggtgactgttgatgatatcaagtttgaaggtaacaaagagttgattcagatcattggtgctgatgtagataagatttatctggatatggttcattctatttctatagatccggaagttatcaagcgtcagaaagatctcagcattgtttatactcctctgcatggtgcaggtcgtgtgctgattccttcttctctgaaggaatggggatttgagaatgtgaattgcgtacccgagcagatggtgaaggatggtaatttcccgacagtggtatctccgaaccccgaaaatgctgaggcgctttctatggctatcgcattggcgaagaagatcgatgctgatattgtaatggccagtgacccggatgctgaccgtgtaggtatggcttgcaaagatgataaaggtgagtgggtgcttatcaatggtaaccagacttgcctgatcttcttgtattacattatcaagaatcgtattgcgatgggtaagatgcagccgaatgactttattgtgaagaccattgtaactactgaactgattaaagctgttgctgataagaataagattgaaatgcgtgattgctacaccggtttcaaatggattgcacgtgaaatccgtttgagcgaaggcaagcagcaatatattggtggcggtgaagaaagctacggcttcctggcagaagactttgttcgtgataaagatgccgtttctgcttgttcattgttggctgaaatctgcgcctgggctaaggatcagggcaagacgctgtatgatgtgctgatggatatctatgtagagtatggtttctctaaagaaacgactgtaaacgtagtgaaacccggtaagagcggtgcggatgaaatcaaagccatgatggataacttccgtgctaacccaccgaaggaaatcggaggttcacctgtcaaattgatcaaggattataagacattgaagatgatcgatgctcagggaaatgctgttgatctggatatgccggagacttcaaatgttcttcagtatttcacggaagacggtacaaagatttctgttcgtccgtcgggtacagaaccgaaaatcaagttctatatcgaggtgaagggcgaaatgggttgcccgaaatgctacgccagtgctgatgctgaagcagaagaaaaagtggtggcggtacgtaagtcactcggcatctgagaaagataaactgctgtaaggcagaaggaaaggtgtaatcctgcgaagggttgcaccttttttgttttttatccgttagcgtggacattctttccgttttaaggttcttttgctttctttaagtcaactctgaaatcattctctgttaaatgccgttttatatgcaacgtataaacctaacctaaaccttagtaatatccatcaggatgataaaaggggattttggcaattagtggcgtaagagcgttttcaatagtgaaagcatcggttgagataaattgctactatcctctttttttctgatggatatattttagaattacttgatggaggtcgaatgaccgggagatgagaaaatatacagattgcggttgcatgctaattggttgatgtgaatgagagtcgtttcattcgtagttgttcgtttgttgaatgcatgtcctccgcaatctgtttttatttgaatgatttccgtcttttaattattgcttagccaccagtctatcatttttcgtgctatgctcagttttcgtggaatttccggcatattttcttttgaatagaatgctccggcactgagctcgtctttctgtaacttgatttccccactttcataatcagcaatgaagcctaccatcagtccgctgggatagggccagggctggttgccgaaataagtgatattcttcactcgtaatccggtttcttccatcacttcgcgttgtacgcattgttccagagtttctcctgcttcgaggaaaccggctaccaaaccatagaatgttccgcggaaattgcgggcatgtaccagcaagatttcttccccgcggcgtattagtacaatgatagctgtagaaataggtggatatatttcgtaagcacacgaagggcactttttcatgataggggtcttatgttccgtaggcataccacacgcgggacaaaaacggctatgctgatcccaatacagtatctgatatgcttttccggcagctttatattcgtccagagtggtgtattcgtaggaaccccggaggttgaccataacccattcttcagtttcagtaacgagctgttcaatggcgaatgcatgtaccatttcatccgtgggcagaaagacttcatggatcgtactacctgagccggggaccaacggtggttctgtaccataaggtacactgtatttaatctctcctttttctgttttctcttttttcagcaacagttggtctttgaaaaagatgaaccactgtgtagggccctgttttttactattcttcattcctgataaaatatctgtttaaaagattatatattagctatattttttcaatacagccattaatttagcccggtctatgggtttaacaagatactcgttgcatcctgcatccatagcagttaggcggtcattctcaaaaacgtgtgcagttaatgctataatgggtaattctgcattgaatttacggatttcagctgtagctgtcagtccgtccataacaggcatcttcatatccatgagtagcagatctatgtgacgtttatgtagtatttctatggcttcctgaccgttggcggcatgcaccagattaaaacgtttccgcaacaaagctgacactaactggtaattgctttgaatatcctcggcaaccaggattgttttacgtccgggagtattgcttgacgaggttccggcaactatatcttttttatctgatgaggttaccctttctgctctttgctgagtaatttcggatggtatttccacttcacaaggtaacagtgcccagaacaatgagcctttaccgtattctgattcaaatcctacattacctcccattgcttccgcaattgctttacaaatagatagtcccaaacctgtaccctgtgcaaattcgtctaatttctcaaaccggtggaatactttgtttttcttttcatccggtatgccgattcccgaatcttttacataaaaatagattccctcttctctgtattcatagcccatttcaatagttccttccggggtatatttaatggcgttggttacatagttggtaatgatttgtgcaacgcgattacggtcgagagtaactaaacagtgttggtaaggattgacagctactatttgtattttggggtttgtggccctttgcttcatagaagcaaacatggagttgaaatagtccgtcaggtcgaattcttcatatttcaattctacagagccggcttccagtttggacaaatcaagaatatcgctgatcaatttcagtaacatttcattgttattattaataatctgcatgtaatcctccttctcttcatcgcttgcatacatcatcagtccggagaaaccgacgatggcattcagcggggtacggatttcatgactcatgttagctaagaaagcggatttgagtttgtctgattgttcagcatgcatctttgctatctgcaattccttaatcatctcttcacgttcggtcacatcgtctacacggatgacaatgccatcagctgtaccgtcttcaagaaaaactggagttccatatacttcgacgacgtgtgcattatcaagtttaaatttgatgagttctgtctgacgggattggaaagcacgtgataatatacactcctcgcacggtgaagttcggttgtgggcacttttatagcaaagttcaccttgcttgtaggcttcgaaagacaagctttttgagcaggaggagacattttcccactgtacgcgatagtctcgggtgatgtatgctaagccggaattggtattgttgagtactaattcattcaaggtaaccaatttcttcagttcttctttatttttgagtaatgtcagttctgcttgtttgtgtgcatctatgcagatggtcatgccaaacatatatttatagggagcatcattcagggtgcttgtttccagcatgccacgggtttgccaccattgataaactccgtcaccgtttaaatcgagttggtattccaattcccaaataccattatcctgttcaacaacggcttgcagggaatcatggaatttttgtttgtcatcaggatgcacacaactcagaaatttctccaccgaacagatctcagaagcctttttggtaacttcattgaacccttcgccaaaacttatcctgtttttgtccggttcaaagaaccaagtaaaggcattcatagctcccagagtgattgaaagaatctgtgcgcgacgtttaagttcattttgcagactttgatcccaacgggtattcagtagtaaacgttttccatcatcttcgataacgctcttgcgcacgattgtatcataactgcgcccgtctttcaggtttacacgctctagtcccagataaggactaccggtattgaagacctcaagatctgttttttgaatacgtgccacttgttcttcatccatgacatcgtatgttgtcgtatcttcgctcgtaccgaacatacgtttactttcttcattgcagaatatataacggaagttatcttctacatcttttatatggatggagagcggaatattattcaatatcttatccagaagctgcttctttttatggatatctgtattgtttttgcgagtacccacgtatttaagtacctgtccgctttcgctataagagtagggggagccgttgacgaagcaatattgccattcggaagaaccgaataacttgatgcgtccttcgaatgtgaacgagaagtcttcaccgctattcattctctgcatgatgctgaccatttctttacggtcttcaggatgaatcgtttctaaataaagatctattgacaggggacgtgatttgtcatatccgttcagaggctcattgtcactaaaaaatagccgggagttgacatcaaactcccaaagcatgatatctgctgtttttatggctatctctgtcttcagacggctttggcggagcatctcttctttctccaaagactctgtgatgtcttccatgataataacataacttgccaattccccgtttgggttacgaatgggttgcccattacattccaggtaacgaatgccggtatatacggtagtgatgtaaccgtctacttttccaaaatcatacggaaaggaggtggatatgggtaatcctgcttttattgcatttttaatttcgtcggtcactaccggactgtcgtatatgtttggatgactttctgccatctcttccatatctgtcccaaatatgcggcagaaacgttcgttgaaatacaatatctttcctttagcgttatagacagctactgctaccggaagtgagttgaggatagtcatgctctggttataaagactatcatattgctgctgtagtttaacatgttcggcaatatcgtttgctagtgagtgcttctgttctttttccatgcgtttgagctgttatttgtctaagttcgtaaatacacacataaagatgcatctatacaagtaaaaaaatactggctaaggattcttaattgagaaaggctatgcatgccgctgcgttagctgcatgaatcattctacaacggataaatccgtcttgtataaacaaatgctgcatgatgacatgctgcatagctgaattggaaagctggctgagacgattttctatcatactctgttgctattacttgaaataatttatttcaaggcgcaaacatatataaaaaaaatcattttcagtctttctctcagcagaaaaaaaacgaagattatcgtgatattttttggtatgcaatcctgggcgtcccatttgagacataaaccgtcccacaacggataaattcgtttcgcgcaaggagattttgcatgatgatattgtctttatgtgtgtccgcacgtaagcttggatattgcttggtgcaccaatttaaacagatatcgccaatgcctttgtaacttccgtcggaagcgatacggtgaatcacataatagggatcatcattcagccaggctccatcttcgataatggaataaaaggggtcgggactcggaacaaaacaaaatgttccgacgatttttccgtgttcatcttcgcatgcgtagcaatgtccgtcggtgatttctttggcaatcagttcacgctgcgggtagccgttgatccactggtttccgtttcctacggatgccataaacttgcgggcatgatcgaatatctccatcaggcggtctaagtcagaaagttggctgggacgaatttgtatcatatctgtaaacctgttaagttgcttaattctggaatacaaatgtacattattattttttatattatccttttcttcttcctttcattagaaattcttcaaagaatgtatcgcggtagctgttgcctatggcaatctcataattgcctatatagatgtcattgttatcaaatgaatcgatgtgacgggtattgacgatataggacttgtttacacggaggaacagatcctggggcaagagctcggagatgcctttcatattcatacgggttatgatgcgctgctccggtaattgaaggattacatagtctttcaatccttcgatgaagagaatatcggcatagtttactttgaaatatttccgttcggacttgacaaagaaatactcggaagatacattggcttcaatagcctctttctcttctttcatcaataaggaatgataggagagagccttctgtacagctttctggaaacgttctgtttctatcggcttgaccagatagtcgatggcatcgacttcataactatccagtgcatattccgtataagcagtggtgaagatgataagtgttcgtttggagacagtatgtgcgaactctatgccggtgataccgggcatctggatatccagaaagatcaggtcgacagaatgttcttccataaaccgtgcggcggacactgcattgttgaacatgctcagtaagcagagctctttattttcttctaccagcatttccatagcctcgcgtgccaggggttcatcatctattataatacaattcataagttcagctttaaatttactacatatttgttttctgtttcggacacttccagtaaatagcgaccgatatataagagttcgagccgacgtcggatgtttgttagtccgattccgcctacacggctcttgcctgttgttatggcaggcttggagttttcacactggaattccaattgattatcatcaactttgaagaaaaggtgaacgtatgacggatgttcgctatcgaaattatgcttcactgcattctctacaaaaggaatgaatagcaaagccggcaattgtatgccatcgatattaccttcctctgtaatattgtagtcaaagtggtcgcgccgtactttctccagattcagataatcgttcaggaaatggatatcggaacggagaggtacatgttcgcggaagttatcattcatctggtaacgcaataaatcttcaagcttgaataatactttagatgcttctgcgggattttttcgaatgagtacattggcattattcagcatattgaataagaagtgaggatttatctggtttttgagaaacttcaattcagaatgcagagtggcagattggatctcatctacacgctggttatagagtatccagtgacggagcaggagtatggcggacattccagctacggtaaatcccatggctaatactcctgatatggcatttaccacgataggcaacagaccgttatcggatgagggaacagaaatatctatggtgaaaatttggaatatggctacagctataatgactatcagactaactccggatacaccgagggcatatatcaacaggcgatttttcaacaggaagcgagggaatagccaataaagattgatatagaaaactgcatcgatggaaataaaatagatggcccatcccagcaacctttgagggaagctgagtggtcgcatggggacattccaaagtatgtttactgtaatcataaataccacgaattgcagaaacagatgccttgccgtccgataacgtggagcaagcaggaaattggtaaaacggttattgatcattttccacctcctttcaattcaagctgaatgctttggccggttaattccagccggtagttctctccgtattgcaaatcaagacgttgccggattttatttaattcctgttccggttccaagcaaggtatggatacctggcagttgaactgaatattctcatcttctgcgtgcagatggatgtcaatggatgcaggatgttcctcctgtgtttcgatttgttttacggtgtactgtataaaagggatgaaaagcaatgggaatacaaaagtgcgtcctatctctcccgatgcgttcatgcggaaatcaaatttgccagagacaagttgttccagttccaaataattggtgaggaatttgatttctgtatttaacagcactttttcccggttacagtcatacaactgataccggagtatctggctcagtttcattaacattttcgaagcctttcccggatttaccaatgcctgctctcctgaatagtggagtacccggaataacatggaaggactaatttgttctttcagatgttctatttcagactgcaatctgattttttccaattgcatcactcgttggttttccagtatccaaagccgcagtaagacagtcatgccaccgcccatgatactgaggagcgttaatgggaaagaggaaagatagtccatcacaaatgccactttagagtatccgacataaatgttaggaactgaaaagatatcggatacaatatactcctgtgtagcttgaaagataaaaactacgattaaagcggttgagagggaaagaatatatgtcaaatatctttgtttgagcaagtaacggggtaccagatagagcaaattgaaatagaaaatggaaccatagagcagaaacatattgaagataagaagataggtccactttcccaacatctctatatagccctgacaactgaataataccagattacaggctatgacaagcagtgccacgatgacagtgatatgtctggctacccggaagcgcgaactgacgaggaagcggtatagaaaagaattatcattgcctataataggtattactttcatggaagtatctttcatttgaggtgacgaagatagaataaattcatataaaacactggattattttaaattaaaactctattttgtagctgatattggtcagacctgttttctgttcacttacctctatctttcctgtttttatattatagaggtgctgaatgaactctttgctgcccgtaaagttgaggcctttcacagagaattcatgagatacacgtcgtttattgatgcggtagcttactgtataattaccaatcaacatcggagaacgttgaatggaatatgcccgcgtttcatcatactgcacttctttatcgaggtgatccatcgttgcttccacatctatcggagcatagcgttctccgccttgcagagtgagcttcagattgacactgagaatgttttgtttattgcgtcccagcatccattctttgccgattagcccgttcaatacatattttcggttaaagcgtgtgttatgccagacaccgtcgccaccgcaataacgggaatcgaacagggaggcagttatcatgtagtagaggcctttgttcagtgctcgttcccatgtgaagtctacaccgaagttgcgccctcgtcctttgttcactaaagcattttccacgaaaaactcatctcggttaagcactgaaaaagaactgtcgcgcatgacgggcacatcgtataggaactgaatgtaaggttccactttcagacttgtattttctgaaaccttataggcgaatgaaagcatcagatggtgtgctttggtgaaatcgaggtttttgtttactgaccggtcaccggtactttgtgtctttacaaagtaaacgtccattttttccatacggctatacataccataagccaaagcaaaggaagtccgggtatttgtttgccatttcaggctggcacgtggctcaagggtccaacgattatttagtgtgagtagttgtccgtgcaggccgaagttcaggcttagtttatcgtttattccccatgcggaactgttgtaggctgaaatcaaactggtgtttccgtctccttttgagattgtttccaacggttggtcaatgaatggagcaagttctaaattcatgttgtagaacatttgtgtaaaggttaatccggttttattggtaaaacggttatttactttccggttcagtgacgaagtcagtatcaggtttgtgcttctgctgttctgatcgatgttaggtgaaggattaaattctctgtcataagtggtttgtatggcttcttggtcggaataggttccggcaagtgtggttttcagcaacgtgttttcattaaagaagtagcgatgggtaacacctccggctgccatgtactgcgtagaacgtccctgtccggcatcttccagataatcccatttatccggattcttttcgagtgagcttttatatttgtcaagtaatgcagtgccccatacggcgaaagtgcctgcgtggcgggtggggaagtttagtttgaagttcaggtcttgatagtccatctttccacctaagtcaacgttcagtaatcctgtagtggagtagcggtaattgaagatatacgaagccttatgtttcttgcttaacggcccttcggaggcgaaatctattcccatgatacctacctggaatgtgttttcatttcgctggttgtttccgttgcgtagcttcatgtcgaatacaccggaaacagcattgccatattctgccggaaaagcacccgtgaagaagtcggagtttcctaaaacctgtgcactgagtgaggacagaattccacctcctaaagtggcgatatctgcgaaatggtttggattgggaatttccacatcttccagtctccactgcaataaatgcggggcattaccgtggatagatataccattgttggaaacgcttggcgttactccggcaaatgaagcaaccagtcgggccggatcatcaaatccacctgcatagcgactcgcttcttccacgctgagcatacgtgctcctgcgacagccattttattcatggcttcgttccggttatgtgcacggaccactacttcgctcagttcgtttacgctttcctgcaaagctatttccagataaacttccttagcggaagtcaccagaatttcccgtacagtcgctgactcatatcctatgaaagaggcttgtacagaatgacggcctaccggaacttttggaagtgcgaaacgtccgagactatcgcacatcatccctaatcccggaatatccgtcaactgtatcgtagcatacggaataggatgtcctgatgcccgatcattgactactcctcgcagtgtttgtacggggcgtccactactttgtgggatattctcattatcagccgatgcttgtccggggatattagaaacttcttttccgaaagagcaaattgaaattagtaatgtaattattactaatactttagttttatccatctttatcgtttttggtttaatgcgacaaagataggtctctgcaatacgctactcttttatttgagacgaaccggatggctttgtagacgaaactcggaaatagcgactaaaatagattcctgaattttagtatttcagttatatatgaaatattggttgttgataattcagaatgattgtttctcaattgtttttctattttatttctttcttcaattttagataatcttttttatggaatctgttaacatgccctacaatatgctgtggaaaggatgaaattagtatttatagtagtcgtttagaacataactatgttcgcactcacaacatagttatgttcttacttacaacataactatgttctaaacgcatttaaaagcatatccttttcatctatcataaaaagatattccagattaaataattgtagtctattattacttaattcgaagtgtcggcatactattattatcgagtttctatcactaaattcaccaatagattacaatttatttctttcagaaattccttatcatgtgatatggcgattaccgttcctgtatagtcccgaatggttgctgtaatgatctcgatactttcaatatccagattattggtcggttcgtccagtatgaaaacatccggggtgttatctgcaatcatcaggcaacagaaagaaaggcgcatcttttctccaccactaagtaacctgcaagacttattccatgtagctgccgggaagagataacgattcaatatcgttttcagctcatgttccggcagatggcgccgattgaaatattccgcttgttccagaatactatattcattatgaataagagaatattcctgatccagataaactgtgctgaaatcaatacggtcaagtgttccactgacggcagaaagatctccgcaaagtagtttcaacaatgtggttttgccgctgccattattgccttcaatatagaagcggtcgccactccgtaactgaaagcttaacggtgttgtccacatgggttggggagcatccggatattgaaagttcatttcttttgcagtagccaataccttaccttcgtgcagagtggaggcattaaaatttgtttttaatttctctacaaggggaagagtactttttatgttttgcatgtcctgctgtaacttttcagctttctcggtatgtacactttttagtttattagtacttacttccgccctgtttttcatagtacccatcataatgcggggaatacctttcttgatagcagccttttcaccccgtacattctgttttgccttttgttccgccaattcacgggcagttttccgggcaagtcgcagggctttttgcttttcttccagttgctcttgcagggcgttcagttggattcctttttgttccttaaagaaatcgtaattgccgccataaaaagttagtccgttagaggctaattcacaaatggcaggtaactggtttagtagggtacggtcatggctgataacaagtacaatggccggagtgcgccgtacaaaatcatataaccgttgccgtcctgttgcatccagatggtttgttggctcatccagcagaatagcgacaggtgagtgcaattccatgccggcaagaaagatacgtgttttttctcccccgcttaatccgcccatcagacgggagaggggaatatcatccattccccaggccgacaaggcagcttgggcacgttcttcaatattccagtcatcattcagtgtggtgaaatgtttttcagatacatctccgtttagaatggcatgtaaggctttcagtttgccatctatccttaaagcctgtgcaatggtccggtcatcatattgcccgaaatgttgaggcacataatagagatgttccgggtggctgaccgttccggttgtagcagataaatcacttgcaataatccgcattaaagtggattttccgcaaccgttgtttccagtcagcgctattttatctcctgggttgataacaaggttcaaatgttggaataagacttctttgtcggaatggacatagctaagatctctgataataatactcatggtaaatactgtgtttaaagaggtgaatacactgtacccaaaaatgctttggatacaataaaatctcgattgtggaagggatagacaaacacagtattggctaaacattcacgtttgtgatgctcagcgttctgaattataaagcatgtaaaaagtgatgtttaccgaaatgtttgtctttacttggaaattctcatcgtagtaattattagttagtgggtgcaaagataggtatttcttttggatattgcaatattactattaaaaggtggatattctgagtatttcgataagccttcgattattagacttttaggtaaaataccgtttttaagaagattttcttaaattgtagaataaaaccatatgtttgccaaataaaaccatatatttgcaaaatatagggtgtatctcgtgagagaacaattaatcattatatttaatttatctcaataaatctcgtatgaaatctactgattccgaacaagaaggagtcggcatggaactggaacagtaccgtaaccggctcgaacaaatggtcgaagaaaaatctaaggacctgattgccatccaagaaaatctggaagcaaccaaccggcggcaggcattattcataaaagtattgcaaatattacaactggaaccggacatacccacagccatgaatatggcacttgcagaaatcggtcgttataccggcgttgatcgtttggcaacatgggaaaaccaccttgacggaattacgtacggatgcaccaatgaatggtgtaacgatggtattgaaccggctatagattacttgcggagtatgactattgaagcggggaagccttggttcgacatgctcgaagaaaaccatatcatctgtacgtctgatatttattcacttgatccctttattactcagatgcttgaaattcagggtgtaaaagctattgctgtttttcctttgtcgcagttaggggtgcatttcggtttcctgtcatttaacttttgctggaataagcagtgggacgaaaaagatgtggaactaatgagccaaatatcgcaaattgtatctaccgctacgaaacgctggcaagtagaaacttccctgcaattgtctcagcgaaccatgcaaaaggtgttggataatatcaatgcaaatatctttgtttgtgattatgatacacagaaggtgctttttgcaaataagcctttcagggaagaagccggacaggtttcgggaaatgcagaatgctggaaaatgctgaatgcaggattgaatggattgtgtgcgcattgcccgaaaccacagttgctcgatgctgatcgcaaatttacaggtgttcatttctgggaagactataatccgattaccgaacgttggtataccatccagagtatggcgataaaatggctcgacggacgatgggcaatcatggaattggccactgatattactactcgtaagcaggtagaactggagctgattttggcaaaggaaaaagcggaagagtcggatagactaaaatcagcattccttgcgaacatgagccatgaaatacgcactcctttgaatgctatcgtgggcttttcaagcctgcttgccgaagctgatgatgatgagcgtgaatcatacatgtctctggtagaggagaacaacgaactgctgcttaatcttatttctgatattttggatatttctaaaatagaggccggtacagtagagcttattataacaagagtggatgtggcccgactttgccgcgaagtcatttccacctgttcgcataaaaaacatgaggaggcggtggggttacgttttgacgaaagttcaccgcagataatggttgatgccgataagaatcgaattatgcaggtgctttctaacttcataaccaacgctttaaaatttacaaccaagggatcggtcactctttcctatagattggaagatgacggtctgttgcatttctgtgtaacggataccggtaaaggtattcctgctgaacagcagcatgagattttcagccgttttgtaaaactcgactcattctcacagggtgccggtcttggtttgtctatatgtcagagtttagtagaacggatgggaggacagattggagtaaactcccgtgaaggagaaggttcgtgtttttggtttacacacccatatacacttgatgcttcattggattcggatgctgtaacaaagggtggagagcaagttataaagatcgtttcaaggaactataaacctctaattctggtggccgaggatatagatagtaactacttgttgatcgaggcgcttctcagaaaggattaccgtctgctgagagcacatgacggcaatgaagctatagaccttttcaatactcaagctcctgatctcatttttatggatatgaagatgccgggtatgaacgggatagatacagtcgttatgttaagggaaggcggtgctcaggtgcccatcattgcacttacggcatttgcttatgacgatgatagggcattggcacttaatgtgggttgcaatgactttttgaccaaacctgtttcgccactcgagttacgcaggatggtcagtaaatggatagggaaataagttttggaagtattattccatagaagacgcgtcaaatgacaaaggcagcaaagcgcccacactcttcatttcgtaaatgccctttttcccgaagagtaaaatgcgcatcggttgtttgaagcgtttttctgtttcaagcatcacttgacggcatgcaccacagggtggaatcggatcatccaaaaaatcccgttcattgcgtgcagcaatggcaagtgtttctactgcctgatcaggatattgggagtttgcataaaacaaggtagtacgttcggcacaaagtcccgatggataagctgcgttttcttgattggtacctgtgacaaccgtaccatttgccaaacgtgcagcggcacccacggagaagtgcgagtagggggcataactgcgttgggtagcttcgcgtgcggcatccatcagttggcggtcagcatcacttaattcattataatcgtatattttaatatcaatttgtaaggtcaaatctttcataaggcagtgatgtatattgtaattaatgttacaaagttagaaaagagattggtaattccaattctttttaagatttttgtacctcaacttttactgatatgaatagaattaacgctatcagactcactgcaatcctggcacttctggtttgtaccgttgccgcccaggcacagcgccggaatacccgttacgtggaatatatagagaagtatgctccgcttgccgtacagcaaatgaaggaacacaagatacctgccagtattaccctggcacaagggcttcttgaaagtggtgccggacagagtgcactggcacgcaaaagtaataatcatttcggcattaaatgcggtagtaactggcgtggacgtacggtgcgtcatgatgatgatgcccgcaatgaatgttttcgtgcatacagcaatcccagggattcttatgaagatcactccgcttttctgaaaaggggtgcgcgttacgctttcctgtttgatctgaaagttacagattataaaggttgggcacgcggtctgaagaaagccggatatgcaactgatccctcttatgctaatcgactgataacaatcatagaggattatgacctttataagtatgacagtcgtggcatgagtaagcgtgaagcccgtaattgggagaaggaattgaagaagaaaccctggctggctaatccgcatcaggtatatatagctaatgacatagcttatgttgtagctcgtgatggcgatactttccgtttcctgggtaaggaattcgatatcagttggaagaaactggtgaagtataatgatttgcataaggattatacattggaagcgggtgatattatctatttgaaaagtaagaaaaagaaagcctctaaaccacatacagtttacattgtgaaagatggtgattccatgcataccatttcacaaaaatatggtatacggttgaagaacctgtacaagatgaatcggaaagatgatgaatatataccggaagtaggtgacagattaagattaagataaaaacagattgcatatactaaaaatgactgctcataagcggtcatttttagtatatggcagaggcttgtaacagaaatataatttgcttgtaaccggaaaatccttctcttgggcatacttttgcattttcttttaaaatattccggttatggcgacaggtgactctttttacgaggacgagtacttgctttccttgctcaggcaaggcagtcaggatgcatttacgcagatatataataagtactattctatgctatactccttgtcttgcaggtatttgcaagacagagaacttgctgaagacgtggttcagcaggtatatttgcgtttatgggaatcccgttcttctgtttgcattacagcgagtctgaaaaattacctttatacaatggcgaagaatcatgttttgaatatgattcgtgataaaaatgaatggatagtcaggcaatatgaaaacatccagcaagaaaatgatattgcagacgatggtttgcaggaaaagctggaggaagaaagaaaactgagttgcttctaccgggctgtgaagcaattgccgggagctaagcgggagatatgtttgctgaagatatatgaagggttgaataatcaagagatagctcatagactgaatatacctgtgggaacagtgaagaactattatacacaatccatacagttattaaaatactacctcaaagaattatattgatgaatgcaataaaagatgtaatgatgaataaggtacttgctggtgaagccggtaaggaaaaggcacgtgagtggggacgttggctggctacggatgaagggcaggcgtatcttgctgcgcaaatggatgccgatttctttgaggaaagagaaaatatggatgatggtatctgtgaagaatcccgtaaaagggtattctgcaatctgcaaaagaaaatttcgagaagacgttttgccggactaactctaaaagtggtagcggcgatggtacccgttgcagctgttatagccatattactctatcttaatacgcaggtttctctttttgaacctccgttttaccaggatatccatgtggcgaagggagaacggatgcaaatagcttttcaggatggtacccgtgtttacttgtatcccggttcccgtctttgttatccggataaattcggtctgacggagcgtagggtgactttggatggggaagcttattttgaagtgagcaagaattctcacagacccttcattgttgatttggataaagcttctatccgagtgacaggaacttcttttcatttgcaggcctatgcttgcgaaccggacatcacagttgaactggatgaagggcaggtagatttactatatggtgaccggcaagaatactctttgcgtccgggcgaatcacttatatataataaggtgaaaaacgcttgtatgcttcaattacaggaaggagtaagcgggcttattcgttggaaagaacaggagatcgatttccggaatactccgatgaaggaagtgctgaaagaattggatttgcattacggtgtccctttttgtgtcggagatacggttgtctatcagtattcttatactttttgcgtgaagaaagcctctttggaagaagtgatgaggacacttgaaataatctcccctgtccgttttcagaagggagataccatccgggtacggatgaaatagcattgacatgtaaaagacatgttcccgttatacactttagcttaccctttgtgtcaatagtacgtataaggatcatattgaattaatttcattaatcatttaacgtataaaaatgaaacgaggtattttgattgttttaatggcttttctgggcttgacttttgttatggctgctcagaaagtaactctgaagtgtagggaagttgccttaaaggaaatcttcgctagaattacgaaacagacagggctgacggtagcctatagttcgcaggtgcttaatgtagatacaaaaatcagtattgagacagagaatgcggaaataacagaagtcttggagaaattgctacccgctacaatagggtataagatcgaaaacagttcaatcctgatattcaaaaaagaagtttccaagaaagcttctacagtcaggatgaagggaattgtttttgataagaagacgcgggaacggttagcaggtgtaacactggttttgaatgataatccgtctgtaggtaccattaccgatatagatggagtgtttcaaataactgctgcccaggggagcaagttgaaagtgtcctatataggatatgaaacgcagctggttgctataagtccggtcgatgaattgaaagtggaacttgatcaggataacttcaaattggatgaggttgtggtaacaggacagggggctgaggtgcaaaaacgccggttatcatcgaatgtaaccactgttagcagtaaggaactggaacgtatgaaacaggggcgtatagaccaggtgttgcaaaatgctctccccaatgtgcagataacgatgtccagtggccaggcaggtgcaacttcattggtaaagtcaagaggtctatcttctgctttctctaactctactcccgtgatttatgtagacggagtgcgtgtggataatatgaacacaggtgcaactttgaataactcattaagcggaaacagtgcagtgaccggttctatcggtgatattccgatggagaatatcgatcacattgagtatgtgacgggtggtgcggccactaccctctatggttcagatgcagccaatggcgttattcagatttttacaaagaaaggagcggagcagaagactacgttctttgccgaaactcaattggaggcggatattgcttcttcccagttttatcattttaaacgtaccaaagaattgttgcatcagacaggattcacacagaagtaccgtgtcggctttgacggtggaacagagaagttcggttatagttttggcggcagcatgagtaacggtacgggaactctgataaagaacggtaacgaggatcgtaaatatgacttgcgcttcggttcaagaatgaaattcaatgaacagtttgaatatcagaactcatttggtatggtgatagaagactttgcgagaagccgcaacggtaaccagggaggatataccggattatggtttacggaaggcgctgcggctactaatttcaggtatacggatgcagcgggcgaactggtgaattatggcgctgatctggacgctttggatgactatacttttgctcagatgaaggcttttgttacgaaagcggaggcattgcaaaacaaccgtgagtccgtaaagcgttttcaaacttcccaatctctgagctatgctcctctggctaatctgactttcaaaggggtattaggagtagattatcgattgaataccaataagaacatcataactaatgaatatctgattcacacccagcagaagccggaaggaacttcagatgcaggcagtatctccaacttcgaccgcaactatttcggtctgactttggatttgaacggacagcataaatatcgttataaagatgtttttagtctgatctctacggcaggcttccagttctttagcacttatgaccaccagtcggtatataatggaacaaacgtacgtgatggtgcccagataatagagggtgcgggaacgttaacttctaatgaatggctaagctatctgtataattacggctactttattcaggaaaatatcggtttcctggaccgctattacattgatttgggattgcgttcggactataatactgcttttggtgacaatgtaggctggcaatattatcccaaagtaggactttcttatgttctctctgaagaaccttttatgcagagactgaaagagaataatcttgtaagcagtttccgtattctggccaattatggtattgccggtagttaccctcctgcttttgaatatcaacgtactgtggcgttcaattctttccagggaggacaagccgcttcttttggtaaatatggaaatccggatctggcacctgaaaagaaacattcgtatgaagccggttttaatgctgtgcttttcaaccgtgtattgaatttgggatttacttattattacgctctgaccaaagatgctcttttcagtatcccgtcccttccttcatccggtcagtctgccaactatttgtctaatgtcggtgaaatagagaataaaggtattgaattgagcattgggctgcaattagtggatacaaaagattggaatgttcgcctgaatgcatcttataatacgaatcataataaagtactgagtattggtaatgcagtgccttttgctattggcggtttctcttcgcgaacggttcaaacggtggtagctgaaggagaaccggtaggtttcatccgtggttataaagccgtactgaatccggataactcactgaaggaaattcttcctttacagaatctgggctctacacttcctacagcttatggtaacttctctttgtcggcaagttataagaatctttcgttcatgttcagcggggattatcaatatggagcttatgtacattcgttcgaccgccagttccgtttctcaaagggtctgaaagacaatgctattccagagaaagcactggaaggacttgatcagggggctaactggcttaatttcactaactttttcgtagagaaatcagatttcctgaaaattaggaatatcggaatagcttatgattataagccgaagaagtatctgaaatcagtcaatctggctttcaatgtttataatccgtttgcctttacagcctcatcggtagacccggaagctgccctggcaggtgcccgttcgcaaggtgcagtagcggtaggtggattgaactactcttcttattccactcctcgtcagtacgtgggaacgatacgtgtctctttttaatcattagtttaactcataaataaatatagatatgaacattaagaattatatattgatagcttccctggcttgtgcctgttcgtcttgtgaacttttacagccgaatgagatcattaatccgaatgtagatgaagatacatttctgaagactcctaatgccatgagtacttgggtgaacggagccaaccgttcgtttgccacgattatcggttcgtatgtggaattgactgaaatactctccgataattattttaataactatagccagagtagtaaggttttcgattttcccactatcctgtatacggatatagatgtaaccaatttgcagcgtcacgtaggtacattgcgggaaacggcgatccagggattagaagtagtggctaaggccgatgcaactactacagatgaacaacgctataatctctattatatcaagggatattcttatctcctggcaggagaatatttccgggcgctccctgttgaaaacgggggagaggtaaagggctggaaggagaacctgaatctggctatctctacatttacggaggctctgaaatttacaagtgatacggatgagacagcatttatcaacaccttgatagcccgtgcctattatcggctcggaaataaagtaaatgcagtgaagtatgccagcaatgtcttgacgttgtcgacggatttcacaaaacaggtgacatttgatggagagaataatgtgataagttctattcagggatatatttatggcaccaatttccaaccactgccccgtttggatttccttgatccgaaatattttcagactaaggcaaaagaggcacgtcctatctgtattgccaaagcggaagaaccctatctgattttggctgaagctgctttagctgacaacgatgtaaacggagcaaaaggttttctgaaaacattgttgacgcttgttagcaatcgtccggtagcaacagacattaatgatcagttggaaggacgttataacggagggtataaagaatatcctaacagttcggaataccgggtagccgcatcttcggaggatgaattcaggagcggacttgtgctcgaccgtcagtcacctcatttgatttctgttccttatatttccggtacttccgttacagaagaaatgattgatgctccaaccacagtcgatgggcttttagaagttctttatctgatgcgacaagaaatctttatggcagaaggcagacgtgcagccgacttgggcattcgtttcccggtatgtgaaacggaagccgcaaatacaccttcggcagcagaatataccactgcacaaattccttctttcattcctttgaatcaggatatggatgcttttgaaatggataaggaagcgaaaacggttgtgattaaatataatatgaaccggattatcgtacagaataaatcttcggaatatgtagcgcctttcttcaattaaagctcttcatgagatccttgccactgttcattcgttttatatcaggtgattgtttggttcgggactaatgaatagtatgtttatccataggaacaattgggtaccaaccttggtcaacaggcttgttaaccaaggttgacggattcgttagccaaggttgataggcctgttaaccaaggtcaacacccaataagacttactgtggagatgaagaacaagcagggcaaaagtaaacgactgcctgtctgttgctaaataactgctgatgcttttattgcgaatggcatgggatgaactacctgaagtatgatatacttatccgaaaatgtacagagtgttcgatatcggacactcttcttttttctctatcgtcttgttttcagttacttacatttttggcacgcatttagtatatataaataatgtgaataatatgcctgttcgtttttgaaagcggaacaggttgaaaactgataaaataataaataactcaatattcaacatggacagagaaattccgaaagaagtgcgtaacaaagagcgcaacaagaaaattatccgctacggtggcatcggcgtggcaagtgtaatcgttatcagcgtactcatctcatttatgcgtacgggagtgaagacaaaagatctggtgttttctacggttgataagggtacgattgaagtcagtgttagtgcatcaggaaaagtggtgccggcttttgaggaaatcatcaattcacctattaatacccgtattgtcgagatatataagaaaggtggagacagtgtggatataggtacaccaatcttgaaacttgacttgcagagcgtggagacggactacaagaaattgctggatgaagagcagatgcgcagctataagttgaatcagcttcgggtgaataatcagaccaaactgaatgatctggcaatgaagattaaagtatcggccatgcagttgaaccgtaaaaaagtggaattgcgtaatgagcagtatctcgacagcttgggttcgggaactacggataaagtgcgtcaggctgaactcagctataatgtggcccagttggaatatgagcagctggagcagcagtatgataatgaaaaggaagtgcttgctgccgaatataaagttcaggaattggatttcagcatattccgcaagggacttgccgagatgaaacgtacgctggatgatgcacagattcgctcaccgcgtaaagctattcttacctatataaataatcagattggtgcgcaggtttcacagggtagtcagcttgcagtgatttccgacctcagccacttcaaagtagaaggtgaaatagctgatacatacggtgaccgtgtggcagcgggaggcaaagcgattgtaaaaataggcagtgagaaactggagggtacggttagcagtgtgacaccgttgtcgaagaatggagtgatctcttttacggtacagttgaatgaagataataaccgtcgtttgcgttcgggcttgaaaacggatgtctatgtgatgaatgcagtgaaagaagatgtaatgcgcattgctaatgcttcttattatgtgggacgcggtgagtatgagcttttcgttcgtaactctgataaagagattgtgaaacgtaaggtacagttgggagacagtaactttgagtttgtggaagtagccagcggcttacaaccgggcgaccaggtggtagtgagcgatatgagcaactataaaaataagaataagctgaaactgaattagctgtaagtaacctgatacataaatcttatgcacaggtttatatcccctatagtgtatcctcctatgtgataatcattaaaaacgatgatactatgattaaactttatcttaaacaagcgtggaccatgataaagcagcatcggctctttaccggaatctacgtggtgggtacaggactttcaatagcccttgtcatgacattgttcattattttttatgtgaagtttgcgcccatatatcccgaatataatcgcaaccggatgctgacagtgacgaaaatgaagtcttatcctaaagataatgataagagttggaactgctctgccgttagttatgatgtagtgaagatgctgcaagatttgccacatctggaagccattggtgcaacagcaagtaactatcgtgaaaattacgtagaggttccagataataatgagccgattagcgtaaccccgctttatactgatgccggcttctggaaggttttcacttttcgatttctgcatggaaaacctttcacgcaagcggatatcgatgcgaaacgcagggaagtggttcttccggtgagcgtggcgaggaaactgtttgctacagatgacgtagtgggaaggcgctttaatatggatgcacaggaatatcgggtttgcggagtggtggaagatgtttctgccgctacgccttcttctgtgggagatatgtggttaccgataacgcttaattcctgggttacttcggatgctaccgggaaattggtaggtagtgtcggtatatatatgaccgctcctgatgctgaggataaagaagccttaaaggaagaagtgcgtgaagttttcagaaaattgaatcttgcctccgataagtacatgaatgatttaatggggcagcccgatgattattgggccagtacattccggttcgactcttgttcagctcctgatttggcttctgagttgagaatgtatctttatatgttgcttgctttacttttcattcctgcaatgaacctgagtggtatgatgtcttcacgtatggacgagcgcctttccgagttgggagtacgcaaaacttatggtgctactaatatgaggcttatagggcaggtattatgggaaaatctcttgctaacctgcattggcgggttactgggattactgatctcttatctgattgtgctgacagcaagtgactggatactaactctctttgacagttatacagatgtggaaaaaactcctttcctctcattcgagatgctcttcaatccgacggtattctgtgcgtcattcggactttgcgtgctactgaacctcatatctgcacttattcctgcaatatgggcattgcgccgaaacattattcagtcgttgaactctaaacgttaagatgctatgatgaagataataagacaccaattatggaatcagcgccggcagaatggttggatatttgtggaactggtggtcgtgagcttttttctctggacggtaatagatcctatttatgtattgacatccaatcttgccattgatcccggttataatgaggaacgggcgtatgccctttatatggaatactatgatgaattgcatggtaagtatgacaaaacccaggacagtactgcgattaagcaggagaatctgtatcgtattacccgcttggtgaagaactgtccggaagtggaaagctttgctttggtgaccagtgccagcttcccaaacagctcttcgtggaatggcgcggaatacttcaatgacacattgaaggtacattcgcaatattaccagtttgtacagacagaggggggagatgtattccgtacgtatggtatgaaggatgccaagagcggacagataatgtctttgcccgaagattgcgctgctcgtgaaggggtatttattacagaacgtatggcagaagagctttttggcaccacagatgcggtaggtaaaagggtgaggtataatgacagtactttccatgaggttatgggagtattgcaggattataaacaccggattaatgaacaaccgggtaatctgttgatacaggtaaatagtaaggtagggaatcacagttggattcagtggatgtatatgttgactttcaaattgaaacccaatgtggatgtcccgacttttgagaaacgcttcaaggcggaagtggttccccaactgaatgtaggtaatttctattttaccaagctgggacgttttgcagatatccgccacaaatatgaaaatgagagtggagtgacgaatactttacgcctgcaatattcattggcaggatttgctttgctctgcgtgttccttggtatggtaggcacattctggatacgctgtaatgcacggaggcaagatatcggattgatgcgcagtatgggagctacaaagaaagttatccgcaatcagtttctgatggaggcatggctactggtaacaatcgcatttgcagtttctctgcctttgactatgcaccgtatctatgtatcaggttttgccaatccgtctgagaatggtaatcctgtatactggcaaaaccagccactgacgcattttctgatagtcagtgtactggcgtatatcgtattgcttattattgcattgctgggtacgtatgcacccgttacccgcgcggcaaagatattgcctgctgaagctttaagagatgaataaaataacgatgcggacagctgaaaacggacagagtgttcatttccgaacagctgcttataaatgtaaatgattgataatgaatgtatgtttgctttggcataccatttgactgaaagctgtgaagaatctataaattgagaactgaataaatcaataacaattaaatacttaccattatgattaaattgactgagataaacaagatttatcgtacgaatgagattgaaaccgtggcattggaaaatgtgaacctcgaagttgaaaagggagaatttctcagtatcatgggaccttccggttgtggaaaatctacattgctcaacattatagggcttttggatgcccccacgagtgggatcattgagattggtggtactcgtacagatggtatgaaggataagcaactggctgctttccgtaataagaagttgggctttgtgtttcagtctttccacttgattaactcattgaatgtgctcgataatgtagaacttcctttattatatagaaaggtgtctgcaaaggaacgccgccacttggcagaagaggtgttggcaaaggtcggtttgagccatcgtatgcgtcacatgcctacacaactctccggtggtcagtgtcagcgtgtagctattgcccgtgccattatcggtaatcctgagatcattcttgccgatgagccgaccggtaacctagactctaagatgggtgctgaggtaatggaactgctgcatcagttgaataaggaagacggacgtaccattgtaatggtaacccataatgaggaacaggcaaagcagacaagccgtaccgtgcgcttcttcgacggacgccaggtagaataagaattgtaattagtaactcgtaattattatgatgcaaactattcgtcaagcctttacgatcctgaggcaaaatccgttgctgagcactatatccatactgggtacggcttttgccatcaccatgattatggctatcgtgattacctggcagacgaagtatgctgacttggagccggaagtgaaccgtagccgctgtctgtatttctctgctatgcacatgcagggaaaagagaataaggataggaataattatagcactccttcggctgcgtttatgaaagagtgcatacagccaattccggaagtggaagcttgtactgcatttacagcggcagatgttgcactggtatctttagctgatggtaacaaccgattgaaagttgatgcaatgaatactgatcctgaattctggaaagttttcagtatgcagtttcttggtggaagagctctcactgaagccgatcggggaggagatatgcgctctatcgttatttgtgcttctgtggcccgaaaactttttggaacaacagaggctattgggcagcaaatattgctgaatagagaactgtcgcgtatcatcggagttgtgaaggatgtttctgttactgccaaagatgcttatgctcaagtatgggggttgtaccataccgatgaattgaaagtaactggttggtggagctatctgggtggaaaaacgattgcagtattggcacgtactcctgatgattttcctgctatcaggcaaggagttgagaaaagagtgaaggatgtcaatgccggtctggaagaaatgcagatggacattatggagcaacctgacaatattgtggcgcacgtgaaccatgtttgggctaatgtaggaccggatctgccgatgctttatctgcaatatggaattgctcttttcatcattttgctggtaccttcgctcaatttgtgtgggctgagcaatagtcgtatgcagcaacgcgtcagtgaactgggtgtacgcaaagctttcggggcaaccggtagcacgcttatccgtcagatattgaatgagaatctggtacttacattgataggaggcatagtagggttggtattcagttatcttgctgtttacgttatgcgtacgtggctgttcactaatagccagaatatcggtacggcaggtgatttcagtttaagtatggacgctttgttcagtccgatggtgtttgtattggcttttgttttttgtctggtgattaatctgttgagtgcaggattacccgcttggcttgccacccgccgtacaattgtagactcattgaacgataaataaaaaggagaccttatgaaattcatattacataatctacgcatgatttggtcgcgtttccgcagtaacggatgggtgctggctgaactgttcctggtgtttgtcgtgatgtggttcctttgtgactcattgggttgcctcaagtacaccttttaccgtcctcttggttacaacattgaccacgtatatagacttacaacgattataggcggcgctacaagtgatacaactttgacaaatgccgacagatatctgcgtgcattgaagaaattggagcaggaacccagcgttgaagcagctgccctgtgttactggagtttgccgatgcacggaagcaacagttacagttcattggctgcacaagatactataggtgtaaatgcacgtatcatcaataccactggtggatacattaacgttttccgcatgagtgatgatccgcaacgtccctttgtggagactccttcagggtgggacaatgtgatgttgagtcaggctgctttcgaccgttttcagaaaaggatgccgacgttctcgttggatacaccattgagcaagtacggtgactccacatcagtcgtcacgcaaggtggaaagattgaagcttttagaacctatcgctatggaagtgatgctccttgctttttctatcgtatggatgaaaatctgattaagagacattttaccgacgagtgggcacagatagtctttcgtgtgaaacctgctgccgatggtccggattatcgtacaaatttcattcgtgagattgcgccaagactggatgtagacgatctgtttgtggctgatgctgtaccttataccgaacagcaactgcaatttgaagtcatgaacggtgatacggataaagtgaatagccaggctattgttgtgctttttttgcttgtaaatgtatttttaggattgataggcactttctggttccgcactcgtcgtcgtcgcagtgagatcgccttacgactggcaatggggagtacaaagaatcaggtgttcaggttactggcgggcgaaggattattgttgctggcattagtaacaatacctgccatgattatctgttataatataggaatcgcagaattcaccataggacgaacggagcttatttctacctggccggtagagtggagttttgtacgcttcctgcttggttctttagcggcttggttcttgatagcacttatggtgatggtgggtatttggtttccggcgcggcaggcgatgaaaatacagccggctgaagctttacatgaagaatagaaaagagaatagtaaaaacaattttaaatagcaaaacttatgaagactttatttataactttgagtttattatttgccgcagtagccggcacagtatacgcagctaatgaaaaggacccgcaggtaagcgaagttcgtaaggtggaagctttttcttctgtaaaggtcacatctgtagcgacggtgtatttcacgcagagtaattcgtattctctgaaaatagaaggtagggaagagtatgtaaccactactactacagaagtgaaaggagattgcttgattatcggtttcaagaataagaaagatggtgataataatcgcaacaaaggggtgaccatctatctgagtgcacccgatctgaaagatgtagagtttactggtgtaggctctttcaattgcgaaggtgcgctgaaactgaatgatgtcaagttcgagatagaaggcgtgggtaaagtgaatgtgaaagacctgacctgtaaatctttagttgtaaagatggaaggtgtaggtaaagctgatatccatgtggattgtgaccgtttgcgtgccagtatggaaggcgtaggtagcgttaccctgagcggacgggcacgtcaggcagacatctctaagggtggtattggtggagtgaatacacgtaacttgaagattggagaataatgataaagcaatattttactcaggcctgggcacagcttcggcaacagccgctgataagtgctgtcagcatagccggtacggcacttgccatcttcctcattatgttggtggtgatgatgcagcaggtgaaggtggcgccttttgctccggagagcaatcgtgaccgttttctgcatgtccactacatgagtattacgaataagaattggggtggtggtagcagtaacggtccgatgggactcaagacggcacgcgagtgtttccaatccctgaaaacacccgaagctgtgactatctacacctgcatggtagtttctacgcctgtaaacttgccgggacaacccggcacaggtatcgacctgctgcaaacggatgatgctttctggcatgtgttcgatttctcttttattgccggaaaaccctatgatcgggctacattcgatgccggacagccggtagcagtgattaccgaaagcgtagcacgccgattgtttcagacgtcggatgctatcggtcgtgagttcctcctgaaccatgcgccatacaaagtggcgggcgtggtaaaggatgtttctacactggctaccgttgcttacgggcaggtatgggtaccttatacttcaacggaaataaccaaggatacctggagtgatgagcacatgggtatgatgagttgcaccatcctggcacggagccgcgatgacttcgaagctatccgtgaagaagcggaacgacgcaggcaagagtacaatgtcattctcggcgaggatggctatgaactgatttatcgtaatcgtccttatgatcaggagaagagttcgattgcgttcagtgccaatcaggagcccgacgtggagcagcatcgccgtcagcgtatgattatttttataatcctgttgatagtacctgccatcaatttgagttcgatgactcaaagccgcttacgccaacgtgtggcagagataggcgtacgccgtgcattcggatctacgaagatggaactgatggggcagattatttcagagaacttggtagtgacgttgctggctggtgctttgggtttgttgttgagcgtggcgtttgcttatctgggtaactcattgctgtttgcacaggaattcagtcagacgctgagtcctccggcagtggatgccggtatattgctgcatgcgtctactttcggttgggcattgctgttctgctttgtgctgaatttgttgagcagcggtttcccggcgtggcgtgcttcaagagtgggaattgtaaatgcattgggcggtcgcctgcattaatcactaaacattaatcattaaagaaaatgaccaagaaacttcttgtacaaataaagaatgaatggcgcaataatctctggctggcgctggagctacttgtggtgagtgtagtgatgtggtatgtggtagactacctgtacacccgtgccgccacttatctggaaccacgcggatttaatatagaaaattgttacctgatagagctgggtgaattgacgccaaagagtccggattacattgccgatcggaaatccgaagatactcacaatgatattgccgaactggtagaaaggttgcgtcgtcgcccggaagtggaagctgtcagcctttcacagaactcctatccctataatggaagtaacagtagtggagaggtgaaaatcgacacgttgaactctcccggttggactatccgtcgcatggtgacccccgactttgtccgtgtcttccgttatcagggtgcacaaggtgagacgcccgaacaaatggctgaaatgctggagcgtggtgagatccttacttctaacaacctttatagtaaatataatcgtaaaatgactgaattcataggccaacgctttcagctttttggtgatacaacgaggacctatcgtctgggagctgcattacaaaacgtgcgttatcatgactatgatcaggcccgcaattcgtactgtttcttatgtaagcagtcattctactatgtaggtttggagctttgtgttcgtgttcgtgagggacaggaccatgatttcattcaacggctgaaagcagacagtgaagctcagtttcgcgtaggtaacctctttatttcagaaattcgttctttccatgatatacgtcgtaacttccagcaggcatggaccaatgatatccgtaactatgtaatgggtatgggattcctgcttttgaatatcttcctcggattgcttggtacattctggttccgtacccagcaacgtcgctcagagattgcattgcacaaagcccatggggcgacggacagtgctatcttcagccgattgctgagtgagggtttgctgttgctggcagttgttacgcctatagcattggttatagactggaatctggcacacatggaactgaattcatggagaaataacaccacgctggagtgggatcgattattactttgtgcagctatcagctttgtattgattgctctgatgattgccattggcattggtattccggcacgtaaggcaatgaaggtacaaccggctgaggctttacatgacgattaaattactttaaaatatgatacgactttatttccttcaagccctctaccacttgcgtgagaaccctatcattacctgggtgtccgtgttgggtacggcaatggccatctgtatgattatggtgcttgtcatcactttccaggtgcgtctcgtagattgtgagcctgaagtgaatcgctcacgtacactctacgtaccttatatgtccgtcaagctgaaggggaaatcggacaatgaatcggctaatgcttctatgtcagtgcgtactggacgtgaatgtttccgtgcgttgactacgccggaagctgtgactttagtcagtagtgctggcaaagtgcgtgcctctgtgcctgccggatcgaaagctactgctgatatggtacagactgatgaagctttctggagcgtttttagtttccgttttctcagtggtacaggatttacccgtgctgattgtgatgccggattaccgcgtgccgtgctgagtgctacgattgcccgccaactctttggtactaccgatgttgtcgggcatacggtgcaattaaactatatagattacacagttgcaggtgttgtggcagacgtatctatgcttgctacggccgcttatgcacagatatgggtaccttacaccgcagccgatgcggaatccctctcttggcaggatgacacgatgggacctatgcatgcggttatccttgcccactcatcggcggactttgatgcgatccgaaaggaaacagaactcttacgccaaaagtataatgacggattacgggatgtagagattttctatcgcgggcaacccgatacacaactggcttatctctatcgccgttggtacgctgaacctgatgttcccggagttatgttacgttatggtatcgttatcgccatcttattattggttccggcagtgaacttatccggtatgactctttcacgtatgcgtcgccgtatggcggagataggtgtgcgtaaggctttcggtgctactggcggtgaactgatacggcaagttttctttgagaattttgtactgacgttgctggccggtgttgtcggattagcgttgagttatgcagccacattcctactgaatgattttcttttcagtaattcgacaaatgcctacctcagtggagagacagcactgactcccggtatgttattatcaccgtgggcttttatagcagctttcgcattctgcctcctgatgaatgtactttctgcaggtattcctgcatggcgtgcgtcgcggatgaatattactgatgcaataaaccaaagatagctatgaagaatctacttacacaaattaaaaatgaatggcgaagtaatctctttctactcgtagagttactgctggtttttgctgtactttggtacattgtagactgggttactgtcactgcgcgcgtttatcgcgctccgatgggctttgatacggaacattgctataatttgtctttcagtaccttgacatccaagtcggcactttataatcctgaactcacagttgaggataatatagatgctttgcttgagataaccgaacgtttacggcatcgtccgggtgtggaggctgtctccatttcacagaactgttacccttataatgagggaagtaacagcgctcagttttatttgcaggatagtattcatgtgggtgcttacctggtttggtctgatccggatttctatcgtgttttccgttatcaggcagttgatggaggctcttccgagcaactggctgctgctatttccgaccaaaccatgattatcacgtccaatgttactgaggattatccggtacttgatttacccgatgcacgtccgctattgaatcgtgaagtggctctgacttatcccgatcgtgggtatcatcgtcgtattgctgccattgccgttcctgtgcgtcgttcccattttgaaacatcgcacgaatggggtggggcgtttatcgggcataatctgaatagagatgagttgattaatgagctgggtaatgtgcgctatgtccaggtgagtctccgtgtttctcctgatgcagacaaagactttatagatgcacttatggcagatgccgaccgcttatatcgggtaggtaacatctttctgttggaggcatcttctttcagcgatattcgtcatatcagcgaacttgaagatgtgaacgaagtgaagacacagctttgcatcctgttcttcctgatgctgaatatcttcttgggagtgattggtacattctggttccgtacgcaacatcgtcgccgtgaagtggcattgcgtatggcaatgggatccagtcgtcgcggcatttttctgcgcttgatgggagaaggcatattactcttgacggtagctgccattcctgcattgattattgcttttaatgtgggtattgccgagttggtggatatcagtaaaatgcaatttacagtcgaccggttcctgattgcagctatacttacgtggttgcttatggcgttgatgattattgtcggcatctggtatcctgcttataaagccatgcagttacaacctgctgaggccttgcacgacgaatagtcaggttttcttctatatgtgcaccttttcttttgcatggggtaaaagaaaaggtgcattctgttctgtatttcaatataatccgtatatttgcgaggaaaattcatagcacatttattcaaaaacagaagaaaaacgagatatgaagagacgcttattcctcgtgatgctgataggcctgtttccttgcattgtatttgccggacacctttatgctgcggaacgtacatacaacgtgcttttcatccagtcatataatcatcgtactccctggaatgaccgcttgacggaaggagtgcgtgatggtctgtcacgtggaggtataaaagcgaaagtcacaacagaatatctggatgctgattactggatttttgcatctgagtgtgtcattatgcggcgtatttgtgaacgggcacgtcaaaaaaacacggatattattattacaagcagtgatgaggctttttatacattgatgcattgtggagattccctgccttataaactaccggttgtgatatcgggtatcaaatatcccaatgaaaagctgatctcgaagttacccaatgtttgtgggtatacatccaagattgatttcgtgcacctactcgaaaatgcacgtcgtgtatttcccaatcgtacagaagttatttgcgtttcggacagtagtcttttaggacttaaaggtgttgctgaactggagcgtatatggcccaatttccaggagcttcatccggaatataagatgaaagtaatgaatgtacagtcacaggctcctaatcctgtcatttcctctatttgttatgattataatgcctataaccgcattgtcattgcccccaaatggacacctttcctttctttcatcggaaaaaactctaaagctccggtttttgccggacaaagtctggcattgactaacggagtattctgcgtgcacgatatggaaccttacgaaggagctaatgcggcaggaaagtgtgctgcacaggtgttgcaaggagctatcccttccgtgataggggtcgtggatcttcccggtaaactgctttatgacttcaagcagttggaattttttagagtgaacgcggataaagtgagtgatagtggcattatcatgaatgcaccgctgatggagcgctaccgtatctggtttgtgctgttttactctgtcgtggtaggtgcattggtctttcttgttatctggctctatcgcttgaaccgtcatgaatcacgtcgtcgtatgcacgcccagacgcgtttgctgatacagaaccgcttggtggagcagcgtgacgaatttgataatatcttctgttctatccgtgacggactgataacttacgatacggatttccgtatacattttgtcaaccgtgctttgatgttgatgctcgaattggaccctgacactcatacggcacgttcttatgaagggcagatggcgggttccatctttcacatttatttaaatggagaggatgtcctgcaatctttactgaaacaggtgagggcagagcggcgtgtaatccctattccggagaaggctttcatgcaggaggtccataaaggaacttattttccagtttccggtgagattgtaccgatctactccaagaacaagatgacaggtatggctatttgctgtcggaatatctcggaggaagaaatgcataaacgcttctttaatctggctgtggatgcaagttccgtatatccctggcaatatgacatacgtacgcacagtttccacttctcaggtgcattgctcgattacttcgggcttcccggcaagcagaccatcttgcggaaagaattggaattttttattcatccggatgatttggaagaggctcgtcgacatttcacagctattttcaaaggcgaggaaatggatacccggatgagtttccgtatgcgtagcggagaaggtaaatatgaatggtgggaattccgtagtgcttcttacaatggcttggattccgaggcaccttatatggtattgggtgtttgtcaaagtattcagcgttataaggctaccgaagaagagttgatagcagcccgtgacaaagctttgcaggctgatactctgaagtcggctttccttgccaatatgagccatgaaatccgtactccgttgaattctattgtcggtttctccgacttgctgaaggacattgaagcattcagtcctgaggaagtgaaacagtttgtggatacgatcaacacgaattgtaccttattgttggcactgattaatgatattctcgatctgtcccgtatcgagtccggttcaatggacttccgttttgccggatacaacctcacgtttgtaatgcagcagatctatgactctcagcgcctgagtatgcctcggggggtagagctggtcatgaagctgcccgaaggtgagggtaaatcgatagtaacggattctgtccgtctgaaacaggtgattaacaacttcatcaacaatgccaagaagttcactactcaaggttctatcactttcggtttccagacagaagagccgggctataccgttttctttgtggaagataccggaagcggcatttcggaagaaaatcagcgacgcatattcgaacgtttctataaagtggatagctttacgcaaggtgccggcctgggactgagtatctgccagactattgtagagcgtttcagaggggaaataaacgtatcttctgaattaggaaaaggtacacgctttacagtacgtgtacctgattttaatgaatagtattattcaactcttttgcatccgttcgcttgcaggaattcatccagcagtatttcgtaatttccctgtatcaggatatgatggtttcccaatggatttttgaggaaatactctgcgggtgtatccattttaatgcgtacctgtgtgcggcacatattaatgtagttcgtattctcggtcagggtgcctgtgctcaggtaatattcgtccagacattctccgccacattttaccagagtgacgtgtcccgtaggcaggattccttgaataccgatacccatctctgtttcaaagtgattgcggatgatgtattgttcggtttgtgcaatacctacggtacagtgagcaagtacgatttcgttggtgcgtgcattgatcatggaagggtttgccatgaaagaagccttgccggtcagcacttttacggcaagttgggtaaagatagattgcaggtcaccttcacatccggcaatgataccgtcatcgttcaatagggagagggcgaggcatccggtggttccggtttgttctatcagtttaaaacagctcagggtgagtgcactcagtttttcttcccccacaatccgtttaatggcgcgatacaggcgcatggcttttatcagatcctccggtgtagcttcgcggcaggcaagcgctttaccggcaaaagcagcgcaggcttcgcccacttcgtcgtctgttacctgattgtaatattcataaacgcgttccagtgaaatgtcggtgtattcaattccccagcgccgtttggaaagaaggtaatctacattgctggcaacaagccaggaagagggggagcctattacgccgatacgcgatccggagagtgcttgttgagctttgaagttactgtgaagtacgaagatacgtttgatgatttcgggtaattctccgtggaggatttcacttttcataccccggccacgtagccaggacgagatttcgagagcggcggccagtgagttttgcataccgtccgccagtaagattgcagggcggggcagagactcgaagtgctggataaccaaccgttctacaccgccggtagcaatgaaaagcaggctgaaatcgtctttagtgagtttgtttatgttttgatattctacaatatttacagtgaaatatttctccagttcgtttaatataagttcgtgtgagccgagaatggatgcttgtttatgcagcaacgatgcaaatgttatcaggtttaataccatggcattgtatatgatttacgatttgacactcaaaggtacaatttcttttgaattcatcactatcttttaagtcatagctagtgtttttaaacttttttgccaatgctttcccgtcatttcaaataaagtgttacttttgcaccttcgattgcatatatatgaaagtgtatcgtcaatcgttaatatttatttgtcaaattgtaaaaacttagacatgccagcaatatctattcgcggaacggagatgcccgcgtctcctatcagaaaactggctcctctggctgacgcagccaagcaaaggggagtgcatgtattccacctgaacatcggacaacccgatttgcccacaccgcaagtcgcgattgatgcaatacgcaatatcgaccggaaagttctggaatatagtcccagtgcaggatatcgcagttaccgtgagaagctggtgggctattatgataagttcaacatcaaactgacggcagatgatatcatcattacgtccggtggttcggaggcggtattgttctccttcctggcgtgcctcaatccgggtgacgagattattgttcccgaaccggcttacgctaactatatggcgtttgccatctctgccggtgctaagatacgcaccattgccactaccatagaagaaggtttttcgcttcctaaagtagaaaagtttgaagagctgattaacgagcgcacccgggctatcctgatctgtaatcctaataatccgacaggttatctttatacccgtcgcgaaatgaaccagatacgtgaccttgtgaagaagtacgatttgttcctcttttccgatgaagtgtatcgtgagtttatttatacgggttctccctatatctctgcctgccatttggaaggtattgaagacaatgtggtactgattgactccgtatccaagcgttactcggaatgtggtatccgtatcggtgctttgattacgaagaatgcggaaatacgtagtgctgtaatgaagttctgccaggcacgtctcagtcctccgttgattggtcagattgctgccgaagcttctctggatgccgatgaggattacctgcgcgatacgtatgatgaatatgtagaacgccgtaagtgcctgatagacggactgaaccgtatccccggtgtgtattcgcctattcctatgggagcattctatacagtggcaaaacttccggtggatgattccgataagttctgtgcctggtgtctttctgacttcgagtatgaaggacaaaccgtattcatggcacctgcttccggcttctatactactcccggttccggtcggaatgaagtgcgtatagcctatgtgctgaagaaggaagacctgacccgtgcgctttttgtcttatcaaaggcattggaggcatatccgggaagagttgaataaatacgtaagaagaacacaagttattatgacatgagtttagccctgtttttggcccgacgtatttatcgcgacagcgatgcgggaaagcaagtttctcgtcctgccgtgctcattgctctgataggtgttgctatcggtctggcggtgatgattatcacggtgtcggtgattgtcgggttcaagaacgaagtgcgtggtaaagtaataggtttcggtgcggacattcagataacgaattcggatgctgcacgttcctacgagacgcgtcctgtggtggtgaatgacagtgtcatctccattttatctgaatatcctgaggtgaagcatgtgcagcgctattccaccaaaccgggcatggtaaagactgctgaggattttcaaggcatggttctgaaggggataggaccagagtttgatcctgcttttttccgtgaacatctggtggaaggagagttaccgcagtttagtgatacggcttcttccaatcgggtagtcatttctaaggcactggctacaaagctgaggttgaaacttggagataagatagatacctattatatccaggatgatattcgtgcccgccgtttgcagattgtaggaatttaccagactaacttctcggaatacgataaccttttcctccttaccgatttatatcttgtaaaccgtctcaacaactgggaaccggggcaagtgagcggtgcagaattgcaggtacgcgattatgatcgtcttgaagagatcacctatcagattgctgccgacctggacggaatggaggatcggtacggtgaagactattgcgtgcgcaacgtagagcagctgaatccccagatatttgcctggctcagtattctggatgtgaatatctgggtaatattgatactgatggcaggcgtagcaggttttaccatggtgtccggcttattgattatcatcatcgaacgtacttccatgatcggcatactgaagtctctgggcgccaataacaccaccatacgcaaggtattcctttggttctcagtctttcttatcggtaaaggcatgctatggggcaatgtcatcggactggcgttctatttcttgcaaaagtggtttggtatcttcaaacttgatccggagacgtattacatggataccgttcccgtatccttcaatattctgctgttcttattactgaatataggtactctgctggcatctgtcctgatgctgttaggcccctctttcctgattacacgcatccatcccgctaactcaatgagatacgaataaaagtgattaggggttagtgataagtgccttcgggatagctcgtagctgattcataacgggatagaaaggaataagactcaccacagattacacagattcacacagattttattttactgattattagattaataaatctgtgtgaatctgtgtaatctgtggtgaattaattcataaccgaaaagaaatgaattattccagcctactcttattttcttaggaaactacttttctttctgaataggcaatacaacttccagcggagtgattgcatgggctgtagaatatcaaataccggaagcgtaaagatgtaacgtcgtttctctccgagatcctttgccgtcttattgataatcagcgcttgcagggtgtatcgcaaggcgaacaacagaaatgcaatgccggctgccaaccagtgaaaattcagtatcccaatcaccagagcggttatccatgctgcatgaaacagtaaccgtgtagtagtttcaaagcccgataaatagcgttggataccccggtagaaatgtgctgtacccatatagctgattttctcttcccgccagtccttggcacggtaaacgggttgcacacgtaccactgcattggcatcggtctctatcctcgtgttctcggctgtagctgtcttattgatgaataaatcatcatctccgcgttgcaggttcaggtgtgctgaaaaacctttctgggcatagaataactctttccggtatgccatgttgcgtccgatacccatataaggctttcccgccagtgcatagcccaggtagcgcatggaagtaaacagattatcaaaagatacccgtttgtgcagccagccttttccacgttcgtatccgctgtatcccagtacgatttgcgcacgggaggtaaagttgcgtgccatggtgcgcagccattggttgctttcgggcagacagtttgcatcggtaaacacaagccagtcatatttgcttgcctttattccgagagtgatggccagtttcttgcggctgatgtagcgtgaagaactgggcacgaagctatgatacaggttcgggtacttttccccttgcagagtcaggtaatcttcgctttcatccgtgttgccatcattgatgacgatcacttcgaattgcgggtaatcctgttccagcacagcaggcagattacggcgcagattttccacttcctcgcgggcatagatgatgaccgataaaggaggcaactcctgtgaaaaatgtatgtcacttcgctttacggcacggctacgggcatgtatacgattataaagacaaaagtaataaaggagttgaatcaggaaaaggataccgacagcggcaagtaatgcttgttctgtagtattgaatgttaatgcttccatgtggtcgtatgacgttttttgtgttgcaaatgtacacaaaaaatatgattatacgacaggtaccaccacaaacttgcttttcgggaaatacttatccagataccggtggatatactgcatcgtattttcttgtattgtagtatcttctacggtaggatagagattatacagcactgtatccagttgtatgccgctgcttcggattgcctcgaagctgagcaatgtatggttgatacttcccagcttgccggaagttacgaatatcaacggatattgtttttctgcaatgtagtcaatcgtcaggtaatcctcggtaagaggaaccattaacccgcctgcaccttccacgagcaccacatcgtagcgtcgggcaagttcttgtgtggcacgttctatctttccgaagtcaatcggacggttgtcgatacgtgcagccagatgaggagagcagggataagagaatatctcaggcatggtcaatccctcacggtcttcctccgtcatgccgatgcccatgagacggcggtgcaggtctatatcctcggaataaccgatgttacctgtctggataaatttctgcgtgataacacgtttgccgctgccaatcagttgacaggcataataagctgtacaataagattttccggcatccgtatcgataccgctgataaaatacacattcttttccatttcctttaatacttaatacttatagttcaccacagagtaacacagagtatcacagagttctattcttttgatttcaaactgattaaactctgtgatactctgtgttactctgtggtgaatagctcatttatatatcttaatcttgtttcttcgtgtaacaatataaataggatgatacgtcagagtgacatttccgtcctcccgtctgaactgttcggtatagctgttgcagaaagtctgtaaccgtccccgtgtccatactttcttttccgttcctgtcactccggtttccttcagatgttgcaacacctggagtggggtgctgaaggggagggagactatttcctcttcagcatacacagtctcaaaatgaggagcaaggagttctttcagcgcttctatgggcagataatcaagtccatgtcctgtgagcgtgcggatttcgcgcatattttcagtaccgaaggtgctgaaagccagataaccgtcttccgacaggaaacgatgacagcgggcgaagaactccttcggatcattgaaccattgcaaggtagagcaggaagtgattaaatccgtcttttcggggaagtctagcgcttcagcatctccgggaatgaactgcacggtatcttgtggaagcaaatcggtgagacactctttcatctccggacatagatcgttcagcagcaggctttccggttgcaacttgtgcagcaacaacctggaatagctgccggtaccacatccgaactccacgatacggcgaaagagcggagaagcgcgctccgtcagcagttgcagcattttctcggctacctgttgctgtacgcgggcttcgtgcgagtaagtatcccgtgcacgggcaaatcgttccgcaatcagtcttttgtccatatttcctgtaaatagtatcggaacagttctacttgataatgggcatcttctgtataatgcactcgtaaggttttccggctgatttccgcttcttttcgccaggcattcagctgattatcgggaggaatgatgcggtcgttgtttcccactaccgcctgttgccaatagaacgaagtggcgggcagcgagagatacatgcgttctatttccgccagttcctctttcagctcctccagcggccgcctgggtgtaatgttcaggaactctttgaaggcctccccgttgaagcacattcttctcagaaacttatgcagggaagggccggtcaaaccttccagggttccgtgatagattgcagtcggaatgccgtatgtatcatcaataggatagggggttccattgatggctatactgtttttgatgacgagagctgtatccgtttcctgcaatttacccattacttgagttgccgcccatactcccattgaccatccgatgacattgatttcgcggtattctttcagcaaggaagcatcaaactccagtgtccggtaatcgtagcagagcatgtagtcactgtccgcaggttgataatctttgaacggggtttcgtcggctccccatccggcaaagaatagtaataaccggggatgtctgtcttttatgatataaacttgcttcataattctgtatcttttttctaaggtacgcggacgacacggatgaaaaattaaaactccgcgttcgtccgtttcatccgtgtcttccgcgtacctgtattattattgtttaatatattttacaagcttcctgacttcttcctcccttatttccgctgtcagcgaaaagcggatacgcgatgtcccctccggaaccgtaggtggccgtacaggcaaggcataaaagccatgccgttgcaactcctcggccttcagaatagtctctgagctttttcctacaatcataggaactatgtaactggcactcggacactcataccctttctctttcagagcttcgcgaagaatattgctgatattttccaaatgtatccttcgctccctgaaaccacccaatcggcggacgataaacaaagtccatgcgatatttaccggaggaagagccgttgtaaaaataagtgttcgcattctgttcactagatactcccggatggtgcgtcggcaaacgatgtatgctccggttgatgcggctgctttgccaaaagtgcctaccagaaaatcaatctcccggatgcatccggtttcttcggcgcagcccagtccttgttcgccccgtgctccgaaagcgtgcgcttcgtccacgtagagcaatacgttttcgtacatctgtttcagccgtaccagttctttcagatcggcagtatctccgtccatgctgaaaatactttcggtgacgacaatcacctgtctgtatgccgcatgattttcggcgagcaaccgttccaattgtttcagatcattgtgccggtagcggatacatttggctgacgaaagccggatgccgtcgatcagacttgcgtgtaccagcttatccgccaatatcagtgtttgcgtatcgctcacggcgggcaggatacccgtattggcatgataaccgctgttgaataccagtgccgcttccgttccgaacagctgtgcaagcgtctgttccagttccgcgtagacggtgaagttaccggtcagcaggcgcgaggaggaagaggtgggcagaaaactgtcggctgtcagttcttgcagaaactcttcccgcaagttgcggtcggcagccagccccaagtaatcattcgaagaaagattcagcatacgctgtccgcctgcgataacctcccgtccttcatggatcagggcgggcagggttcgcaggttgctgcgctctttcagtccttgcagttcttgctgcatttgatctgttacattcatcctatttctcctataatcttcaataatccgcttgtcaactttgtcaactgctccggctctatgatgaatggtggcataatgtaaaccagtttgccgaaggggcgcacccaaattccttcctccacgaaccgtttttgcatccacgccatgtctaccgggtcttgtacttcaatcacaccgatggcgcccaacaccctcacatctgccacctgtggaagtgctagcgcaggttccagttcacgccacaactgttcttcaatgcggctcacttttccctgccaatcgtattcggatgaggtcaacaggcgtatggaggcgcatgccactgcacatgccagcggatttcccataaatgtggggccgtgcatgaaagctcccggtgcatgattggagattgaatccgccacttcgtttgtggtcagcacggcggacagcgtcatgtatccgcccgtcagcgctttgcctatgcacatgatgtccggttccacgcctgcatattcccaggcaaacatcttgcctgtacgcccgaatccggtggctatctcgtcaaagatcagcagaatgtcatattccttgcatattctggcggcttcacgcaagaattgcggatgatagaaccacataccgccggcaccttgaacgatgggttccagaattagtgcagccagttcttcgtgatgcttttccacaatgtccaacagttccagtgtgtcttcggcattccagtcgccatcaaagcgcgattgcggacgggaagtgaaataccgcaccggcaatgccgagccgaacagggagtgcattccggtcaccggatcgcatacggacattgcgttccaggtatctccgtgatacccgcgacggatggttacgaaattacttttctttgtcagatgcgcccgtccgggagccgactgacttttggcataccaatactgtacagccattttcatggctacttccacagctaccgaaccggagtcggcataaaatatcttttgcatggatggcggcaccagtggcaacagcagtttgcccagttctatcgccggatcatgcgtcagtccgccgaacatgacgtgtgacatcttttccgtctgttcccggagagcctggttcagcaccggattgttgtagccgtgcaccatgcaccaccaggacgacataccttctatgagcacctctccgttttccagtgtgatggttgccccgtctccccgtttcaccttatacaccggtaaggggttggtggtcgatgtgtaaggatgccacaaatgttccctgtcgaactgtgagtcgctgaaacggtagcctgcatcttctatcagtgctttgtcttctgagactttcgatccgagggtcgtgagcaaatctcccacgatggcggagttcacacctatgtacaaggattttttcacggcttcctttgtcagttgagagcgtccgcctgcaaagcgcaggtaggctgtggggttgatgaagcggaacagggcgatggtggtcagcacttcttcctcggtcagccgggactggctttccaacggtgttcccggaatgggctgcaacagattcagcgggatagagggcacttccagatctctcagtgtaaaagcgaattcaatccgctgtccggctgtttcgcccatgccgatgataccgccgcaacaaatatccattcctacgcgacgggcggctgccagggtttgtagtttttcttcctgtgtgtgtgtgctgcacagggtggggaagtggcttggggcggtttccaggttgcagtgatagcgcgtcacgcctgccgtatgcaaggcgcgcagctcgtcttcattcagcagtcccagcgaagcgcagagttggatggagcttttccgtctcatatatcgggcggcttcacatagcttctccatgtttttccccgaaggcttccgcccgctggtcaccaatgagaagcgggctacgccttgtgattcgttgtgcagtgcatggcgcaggcactcatccttatccaccagatcgtaaacatccgctttcgtcttatagtgtgatgattgtgcgcaccatttgcagttttcggggcagcggccggactttgcattgatgatggagcacatatcgaactcctgcgatgcccgtgcggcggtgatctcgtgtgccgcttcatagagggcttccttatccggctgtgtggccaaccattccgcttctgcctgtgtgacggggacatcttgcagtactttgtttttcaattcttctactgtcatattcttactaatttagcaaattcataggagttatcatttcattaggaattaaaggaggtaaagccgatactcctgaaaaaagatttttgggagctacttcctttacctctaaatacatgtgacgcgaatcgtgcaaatctgaaaacagcatttgcatgatccgcgtcacatgtgttccactcttatttataatggtgtttatatccaacccctgtcttgttttgagataggggggatttacatactttttccctttaggaccgattgtagccgggcacaaaacaggcgtcaatcctctgaaaccgaagatttcgagctttgttcccaatccgttctcgcttcccaacggtatgcctatgtcagtttcctgtcctttaccgttgtctgtatcttccagactctgcctgccgcttttgcagccggctgatgttccggacttttgtttggagagcgaagagtccgccacacttttgggcaggcaaccgatagtgacgcaacgtcccaggctggcaaatgcagcataggctttccggctccatttcctgaagcgcagggtcgttctatagagttgtcttttcctcacgaggtttccggattggttcaatgccgtttttcggtattattcttgttaatcggctgcaaatgtaacaaaaatatttttctctttataacgattgaaggcctatgatcgcatgaataaaaaatagttcccccacgtttcacaacgtagagccgaagtttcatcggacgttggtacacttggtacagaggttcaccgttccctttgcttcacacacacgcgcgtaatatataaggtgtacactcaagaggaaaatgtggcaaatgacagtaatccgctgtcatgggggagcttttacgtttcgcctcaccgacgaacagaagaaggaattcaaggcctatgggatctcgccattacctccgcttccacttgtctgaagcacttgcggaaacacggtctgtaggaaagcgtagacggaaatggaacttatacaaagtcggataagcggtgaggaatgatcagtggtggggacagagtggtggggattcacaccttattatacgcgcacgtgtgtgtgaggcaaagggaacggtgaacctctgtaccaagtgtaccaaccccaccattacaaaaccatacctcaactccgcaaaaatgaatctcaaccttacctcgctaaacctcagctctgcaacgctaaacctcagctttaggttctcaaaccttagctttacacttccaatcctcagctttaaggttcttccagtacttttccccgcctctgtctacgcgcacattgcgcgcacgcatatataataatgtacccccttccagctcctttcatacttcctttcaaaattatgttctacaacatccttatcaatcagccatttacaaaattgtttcaaaaaagtttcgaaaaaaagtcagatatgtttggagtgaatggatatatcggctacttttgcacccgctaaccaagagacggtcagccttgaaattgacattctgacagaaacggcgtaggaactccaacgtttttcttttctttagcctttattccgatcaggaatacagcgttctaaaagaaaaaagaaaaaaacttccggaaacatttggaagatatgcttaaaagttcttacctttgcacccgctttccgagaagaggctgacgctgagtcagcttccctgatagaggcggcgctaagaacttcttcttcttttatctccctttcgcaaagagagacgacgagaaaaagaaaaaagaaaaaaaactttcgaaattatttggaagatatacttaaaagttcttacctttgcatccgctttctgaaaagaaaagcagttttaaaaagaagcgatctttgaagaatttacataaacaatacaagtagtacaagagcaggtgcttcgcaaattaatgattaaaaattaataataaaagcgcagcatctgggtataaaaaaagaaccgtcaagtaacttatatatataggtaatttgaagacttttaataaaccgagcgtcctgaacagagcaaaaacactgtcgctttttaataattaattattaatttgcgcagtcacaatacttttacaatgaagagtttgatcctggctcaggatgaacgctagctacaggcttaacacatgcaagtcgaggggcagcatgacctagcaataggttgatggcgaccggcgcacgggtgagtaacacgtatccaacctaccggttattccgggatagcctttcgaaagaaagattaataccggatagtataacgagaaggcatctttttgttattaaagaatttcgataaccgatggggatgcgttccattagtttgttggcggggtaacggcccaccaagacatcgatggataggggttctgagaggaaggtcccccacattggaactgagacacggtccaaactcctacgggaggcagcagtgaggaatattggtcaatggacgagagtctgaaccagccaagtagcgtgaaggatgactgccctatgggttgtaaacttcttttatatgggaataaagtgagccacgtgtggctttttgtatgtaccatacgaataaggatcggctaactccgtgccagcagccgcggtaatacggaggatccgagcgttatccggatttattgggtttaaagggagcgtaggcggactattaagtcagctgtgaaagtttgcggctcaaccgtaaaattgcagttgatactggtcgtcttgagtgcagtagaggtaggcggaattcgtggtgtagcggtgaaatgcttagatatcacgaagaactccgattgcgaaggcagcttactggactgtaactgacgctgatgctcgaaagtgtgggtatcaaacaggattagataccctggtagtccacacagtaaacgatgaatactcgctgtttgcgatatacagcaagcggccaagcgaaagcattaagtattccacctggggagtacgccggcaacggtgaaactcaaaggaattgacgggggcccgcacaagcggaggaacatgtggtttaattcgatgatacgcgaggaaccttacccgggcttaaattgcaaatgaatatagtggaaacattatagccgcaaggcatttgtgaaggtgctgcatggttgtcgtcagctcgtgccgtgaggtgtcggcttaagtgccataacgagcgcaacccttatctttagttactaacaggtcatgctgaggactctagagagactgccgtcgtaagatgtgaggaaggtggggatgacgtcaaatcagcacggcccttacgtccggggctacacacgtgttacaatggggggtacagaaggcagctacacagcgatgtgatgctaatcccaaaagcctctctcagttcggattggagtctgcaacccgactccatgaagctggattcgctagtaatcgcgcatcagccacggcgcggtgaatacgttcccgggccttgtacacaccgcccgtcaagccatgaaagccgggggtacctgaagtccgtaaccgcaaggagcggcctagggtaaaactggtaattggggctaagtcgtaacaaggtagccgtaccggaaggtgcggctggaacacctcctttctggagcgacgctcagtcaaaatcagagattttgaaattaataattaacaattataaattaaaaactctctgtactaacaaattaaaagttggttcttttgacatgctacataagaacctcttgcactacgcgtagttgtttatataatatatattgagaaagaagaagccgagccgcaaggcgaggttgaactcgacagtcctatagctcagttggttagagcgctacactgataatgtagaggtcggcagttcaactctgcctgggactacttcttaaattagaaattagaaattaaaaattaaatttacgacatcgcattttaatttataatttataatttttaattaatgaagggggattagctcagctggctagagcacctgctttgcacgcagggggtcaacggttcgaatccgttattctccactctggtgacgatttaatttttaattattaattattaatttgcttgccaaccgttctttgacatgatgtacaaaaaaagtaaagttataacaagctgaaagtatatatcgagccatacggctaggtaagactaaaagtaagtaagggcgcatggcggatgccttggctctcggaggcgatgaaggacgtgataagctgcgataagctgcgggtaggtgcaaatgacctttgatccgcggatttccgaatgggacaacccaatatcttgaagagatattatccatcttacgatggaggcgaacgcagggaactgaaacatcttagtacctgtaggaatagaaaataaataatgattccccaagtagtggcgagcgaacggggaatagcccaaaccatatgtgttacggcatgtatggggttgtaggaccacgttgtgggacgaaagttagtgagtagaatgatctggaaagttcagtcatagacggtgataacccggtatactaagctaattgaaccctagtggtatcctgagtagcgcgggacacgaggaatcttgcgtgaatctgccgggaccatccggtaaggctaaatactcccgagagaccgatagcgaaccagtactgtgaaggaaaggtgaaaagcacttcgaacagaagagtgaaatagtccctgaaaccatgcgcctacaagcggtcggagcagtttaaactgtgacggcgtgccttttgcataatgaacctacgagttactttttccggcaaggttaaggatcttgagatctgcagccgaagcgaaagcgagtcttaatagggcggatagtcggaaggagtagacgcgaaaccaagtgatctacccttggccaggttgaaggacaggtaacactgtctggaggaccgaaccgataagcgttgaaaagcttccggatgagctgagggtgggggtgaaaggctaatcaaacttggagatagctcgtactccccgaaatgcatttaggtgcagccttgatttatactaatatgaggtagagcgactgataagatgcgagggcttcgccgcctatcaagtcttgacaaactccgaatgcgtattagttctatatcaggagtgagggcatgggtgctaaggtccatgtcctaaaggagaacaatccggaccatcagctaaggtcccgaaataattgctaagttgatctaacgaagtcagattgctaagacagctaggatgttggcttggaagcagccattcatttaaagagtgcgtaacagctcactagtcgaggagtttggcgtggataataatcgggcataagcaatttaccgaagctatgggatgtgcaaacatcggtaggggagcattctactcagcgttgaaggtgaagcgtaagctttgctggagcgtgtagaaaagcaaatgtaggtataagtaacgataaagggggtgagaaaccccctcgccgaaagactaaggtttcctgatcaacgctaatcggatcagggttagtcgggtcctaaggctcagccgaacggtgaggccgatggcagaacaggttaatattcctgtactaccttaaagagtgacgtggagacggaggcgtgacagtgccgcgaactgacggaatagttcgttgaagggtgtagatgttgatcggggcaggcaaatccgctccgagagtcgaacctgatagtatggagcgttcttcggaacaatccaatagtgcatgtaagcatactcccaagaaaatccgctaaacttaatctttaaggtacccgtaccgtaaacggacacacgtagtcgggttgaatatactaaggcgcttgagtgattcacggttaaggaactaggcaaattgaccctgtaacttcgggataaagggtccccactgcgaggtggggcgcagagaatcggtccaggcaactgtttaacaaaaacacagggctatgccaaattgaaagatgaagtatatagcctgacacctgcccggtgctggaaggttaagaggagatgtcatcgcaagagaagcattgaattgaagccccagtaaacggcggccgtaactataacggtcctaaggtagcgaaattccttgtcgggtaagttccgacctgcacgaatggtgtaatgatctggacactgtctcaaccgtgagctcagtgaaattgtagtatcggtgaagatgccgattacccgcgatgggacgaaaagaccccgtgaacctttactatagcttaacattgaatttgggtaattgatgtgtaggataggccggaggctttgaagcaggtacgccagtatttgtggagccgctgttgaaatacggccctttggttatttgagttctaactcgccagtgcgaggacactgtttggtgggtagtttgactggggtggtcgcctccaaaaatgtaacggaggcttctaaaggtgccctcacgccgattggtaaccggcggcagagtgtaatggcataagggcgcttgactgggagacttacaagtcgatcaggtaggaaactagagcatagtgatccggtgtttctgtatggaaaggacatcgctcaaaggataaaaggtactccggggataacaggctgatccctcccaagagctcatatcgacggaggggtttggcacctcgatgtcggctcgtcacatcctggggctggagaaggtcccaagggttgggctgttcgcccattaaagtggcacgcgagctgggttcagaacgtcgtgagacagttcggtctctatctatcgtgggcgtatgaaatttgcgtggctctgacactagtacgagaggaccgtgttggactgacctctggtttaccagttgtgccgccaggtgcattgctgggtatctaagtcgggattggataagtgctgaaagcatctaagtacgaagccagccacaagattagatttcttagggtcgttgaagactacaacgttgataggatgcaggtgtacaggtggtaacatcatagccgagcattactaattgcccgttcacttttggtctttgccttgtatggcaggtatatacgttcagtttaaaatctttgcttttttgcatcatgtctaacttatttaggtgactatagcatcagggttccacctcttcccattccgaacagagaagttaagcctgatcacgccgatggtactgcgtcaagtgggagagtaggtagttgccgttttttagagagaagcctccatatcgaaatgatatggaggctttttgtgtttataggtataatgtttgtataatggttactttcagtagctttttttcctctttgaaccttctattttcctttttcagcaagcaatttctttttagtttgaaacttcatccttatctttacagaataaaaatggtataaaaaggctttttttgaaaaataggacgtttttattccattctttcccccttttttctaagggattttagtacttttggactcgaatctaataaaaagggaaaaaatcgcaattatataattattaaaattactcctgtgtatatggaaaacaaaattcaagagttgactgataagatttaccgcgagggggtcgaaaaaggtaacactgaggcccagaaacttatcgctaacgctcaagatgaagccaagaaaattgtggaagacgctcgtaaagaagctgaagcaattgtggctgcctctcgtaagtctgccgatgaactggcagaaaataccaagtcggaattaaaattattcgccggccaggcagtgaatgcactgaagtctgaaatcgctacacttgtgacggataagattgtcaatgcggatgtgaaagcatttgctgccgataaggattatctgaatgccttcatagttgcattagcttccaaatggagtgtgaacgagcctatcgtgatctctaccgccgatgccgacggcctgaagaaatacttcgccgcacaagcaaaagcgttgctggataaaggtgtgaaaatagaacaggtaaatggtaataagacgttgttcaccgtttcgcctgccgatggttcgtacaaagtaaacttcggtgaagaagaatttatgaattacttcaaagaattcctgcgtccgcaattagtggaaatgctgttctaaaaccacaggatatgagtaaatactattactacttggtagccggtttgcccgaactcactttggaggatagcaaactgagctatacggtagctgatttcaaagcggaactgtatccggatttgtccgacgaagatagacggttgattgacctgttttatctgaagtttgacaatgcgaacgttctgaaattactaaaggataaagacgctgccattgactctcgtggaaattattccgcagaagaattggctgagtttatctcatcgcttaaagatggtgacgaggtggctgatgccgtatttccttcctatctctccacttttatttcagaatatttcaatactcctgccgaggatgattttctgcatgaggatcgtctggctgcgctttactatgcgtatgcaatgaagtgtaggaataagttcgtgtcttcctggtttgcgttcaatctgacaatgaacaatgtgctggtggcactgactgcccggaaattcaagatggatatcgctccgctgatagtgggagatacggaagtgtgcgaggctttgcgtacatccggtgcccgtgatttcgggctgacgggagaggtggacttcctggatcagttggtaaagatcagtgaaaccgaagagttagtggaacgggaaaagaaaattgaccagttacgttggaattggatggaagaagctaccttcttcaactatttcaccgtagagcgtctgttcgtttttctgctgcaactggaaatgatagaacggtggatttctttggataaggaaaagggtaatcagttgttccgcagcatcatagcaacgctgaaggatgaagtgcagattcccgcagaattcagataaaataaataacataattatatggcaacaaaaggaactgttagtggcgttatcgccaacatggtaaccctcgtcgttgacggcccggtggcacagaacgagatttgctacatctcgaccggcggtgaccgactgatggcggaggtgattaaggtggtaggtacccatgtgtacgtgcaggtgtttgagagcacccgcggactgaaagtaggggctgaagccgaatttaccggacacatgcttgaggtgacattaggcccgggtatgctttcgaaaaactatgacggtctgcaaaatgacctcgataagatggatggagtcttcctgaaacgcggacaatatacctatccgctggacaagggaagcagatggcactttatgcctctggtgaaagtgggtgataaagtggaagctgctgcctggctgggccaagtggatgaaaacttccaacccctgaaaatcatggtgcctttcactcaaaagggtgtatgtaccgtgaaatccatcgtagacgaaggtgagtacagcatcgaagatatcgtagccgtactgactgacgaagaagggaatgacatccatgtgaacatgatacagaaatggccggtgaaacgcgccatgacgaattataaagaaaaaccgcgtcctttcaaactgttggaaacgggtgtacgtgtcattgataccgtgaatcctatcgtagaaggtggtacgggatttatccccggcccgtttggtacgggaaaaacggtgcttcagcacgccatttcaaagcaggcggaggcggatatcgtaatcattgctgcctgtggtgagcgtgccaatgaggttgtggaaatctttacggaatttccggaactggttgacccgcataccggacgtaagttgatggagcgtacaatcattatcgctaatacttcgaacatgccggtagctgcccgtgaagcatctgtatatacggctatgacgattgcagagtattatcgtagcatgggtctgaaggtattgttgatggctgactccacttcccgttgggcacaggctttgcgcgagatgtccaatcgtatggaagagttgcctggacctgacgcattcccgatggacttgtcttctatcatctccaatttctacggacgtgccggatatgtggtgctgggtaacggtgaaacgggttctattacctttatcggtacggtgtctcctgccggtggtaacttgaaagagcctgtaacggagaatacgaagaaggtagcccgttgtttctacgctcttgaacaggatcgtgccgacaagaagcgttatcccgccgtgaatccgattgattcttattctaaatatatcgaatatcctgaatttgaggaatatatcaaaactcacatcaatggcgagtggatcggtaaggtgaatgaaatcaaaaaccgcttgcaacgcggtaaggagattgccgaacagatcaatatcctgggtgatgacggtgtacctgtagaatatcatgtaacattctggaaatcagaattgatcgacttcgtaatcctgcaacaggatgctttcgacgaaattgacgctgtaacgccgatggagcgtcaggaagatatcctgaacatgattattgatatctgtcatacggagtttgaattcgataacttcaatgaagtaatggattattttaagaaaatgatcaatatctgtaagcagatgaactactcgaagttcaaatcagaagaatatgaaggattccgtaagcagttgcaggaactgattgaagaacgtaaagcataaggaaaagtacaatttaccatttacaaggtacaatttgccgttcggcatgtgtgtgtaggtggtaaaaagttagaatgcgaaaattgtaaattgtaaattgctaaattgtaaatatatagatggcaacaaaagcatttcaaaaaatatataccaaggtcactcagataacgaaagctacgtgttcgctgaaggcaacaggggtagggtatgatgagttggcaaccgtaaacggcaagctcgcccaggtggtgaagattgccggtgacgatgtgactttgcaggtatttgagggtacggaaggtatcccgaccaatgcggagatagtatttctgggtaagtcgcctacgctgaaagtgagcgaacagcttgcgggacgtttcttcaacgctttcggtgatccgattgacggtggtccgtctatcgaaggtcaggaagtggaaatcggtggtccgtctgtgaacccggtacgccgtaagcaaccgtcggaactgattgcgactggtattgcaggtatcgacttgaacaatacgctggtatccggacagaagattccgttctttgccgaccctgaccagccgtttaaccaggtaatggcgaacgtagcacttcgtgccgagacggataagatcatcttgggcggtatgggtatgacgaacgatgactacctgtactttaagaatgtattctccaacgccggtgcgctcgaccgtatcgtcagtttcatgaatacaacggagaatcctccggtagaacgtttgctgattccggatatggcgttgacggcagccgaatatttcgctgtgaacaataatgaaaaggtattggtactgttgactgatatgacctcttacgctgatgcgttggcgattgtatccaaccgtatggaccagattccttcaaaagattctatgccgggttctctttattcggatttggctaagatttatgagaaggcggtacagttcccaagtggtggttccattaccattatcgcagtgacaacattgtccggtggcgatattacgcatgctgtgcctgataatacgggttacattacggaaggtcagttgttcctgcgtcgtgatacagatatcggtaaggttatcgttgacccgttccgttcactgtcccgtctgaaacagctcgttacaggtaagaagacgcgtaaagaccatccgcaggtgatgaatgctgctgtacgtctgtacgccgatgctgccaacgccaagacgaagttggagaacggtttcgacctgacaaattatgacgaacgtacccttgcatttgccaaggattactccaaccaattgctggctattgatgtgaacctcgatacaactgagatgctcgatgtggcttggagcctgttcggtaagtatttccgtccggaagaagtgaatatcaagaaagaacttgtggaccaatattggcccacaaattaaaaattaataattaaaaattaaagctacgcggtgaggacggataatgtgattgatcagagggctgttgcttttggggttaggattgtgaaagcttgcaggtttttacaagaaaacaaaaaggaatttgtgttatcaaaacaagtccttcgatcaggaacagcaataggagctatgattaaagagagtgaatttgctgagagtaaagctgattttgttcataaattgagcattgcactgaaagaggcaaatgaaacgaaatattggttgcttttattgcacgaaagtgaatatttagatgatagttcttatgaatcggttaatgaagattgtttgaatttgattcgtttacttgtttctattattaaacgaatgaaatgcgcagcttgatttttttattaatatataatgtgataagtatgagcctttaatttttaatttaaaatttttaattaataaagtggctataaagtttcaatataataaaacttccctccagcagttggaaaagcaactgaaagtgcgggtacgtacactccctattatcaagaataaggagagcgcactacgcatggaagtgaagcgctgcaaatcagaagctgccgcgctggatgagaagttggaacgggaaatccaggcctacgaagcgatgttcgccctttggaatgagtttgactcctcattgataaaggtgagcgatgtacatctcggcgtgaagaagattgccggtgtacgggtgccgttgctcgaaaacgttgatttcgaaatacgtccctacagcctgttcaatgcccccaaatggtatgccgacggcatacatttgctcaaggtgttggcacagacggctatcgaacgggagtttatcgtcgccaaactgggcttgctggaacatgcacgtaaaaagactacccaaaaggtaaacctctttgagaaagtgcagattccaggctatcaggatgctctgcgaaagatcaagcgcttcatggaagacgaggagaacctctccaagtcatcgcagaaaatcatgaaatcccatcaagagagtaggaaggaggcagaagcatgattacaaaaatgaagaagctcacattccttgtatatcataaggagtacgaggcatttctgaacggagtgcgcgaacttggagtagtgcacgtggctgaaaaacagcagggagtagctgataatgcagagttgcaggacagcatccggctttcttcgcgtttgcaggcaacattgaaaatgctgcatgaattgagcgaagcgaaggaaactacacccgcttctgctgctcgcgggctggaagtgctggacgaagtggatgtgttgcaaagtgaaaaaacgaagctgcaacaacagttgcaaaactatcagaaggagaaagccgccctggaaccctggggtgatttcgagcctgaaagtctgaatcttctgcatgatgccggctttgcggtaaacttttactgttgctcggaaggtagctatgacgaagcttgggaggaaatttataatgcgatgattatcaattgtgtatcctcacgtatctatttcattactgtaactaagaatgaagtggaagtagatttggatgcagagcagataaagttacctccttattcattgacccgtgtgcagatactttgtcaggagactgaacaggctttggcggacaatgaccaaaagctggctgtgcttgctgagaaggagcaaccttcattacaagcagccttgaaggaggtgaacactgaaatagagttttctcaggtgatactgaacacagaggctacagctggagaaaaactaatgttgctgcaaggctgggcgccggcttccaaagaaaaggaaattgccgcatggctggatgaacagcatatctattatgagattacgaatccgacaccggaagataatgtgcctatccaattgagcaataaggggttctttgcctggtttgagccgatatgcaaactctacatgcttccgaaatacagtgagttggatctgacaccgttctttgcaccgttctttatggtgttcttcgggttgtgtctgggcgactccggttacgggttgttcctgttccttgccgctacgctgtaccgtatgttcgccaagaatatcagtgctacgatgaagccgattctttcattgatacagatattggctgcttctacattcttctgtggaatgctgacgggtacgttcttcggagtgagcctctatgacataaacatacctttcttgcagtatatgaaggatcatttgttcatggataataatgccatgttccagttgtcactgatacttggtgtgattcagattctcttcggtatgatactgaaagcagtcaatcaggctatacagttcggctttaagtatgccgtagccactatcggttggattgtgttgctgatatcctgcggagtaggattcatgttgcccgaagtgatgcctttgggtggtacggtacatctgtgcattcttggtgtggctgccgttatgatatttctcttcaacagtcccggtaagaacgtgtttatgaatatcggactgggtttgtgggattcttacaacatggctacgggtttgctgggcgacgtgctttcgtatgttcgtctgtttgccctcggtctgtcgggaggtatccttgcgggagtattcaacagtctggctgtgggcatgagccctgacaatgtgattgtcggtccgattgtgatggtactgatattcgttatcggacatgccattaacatgtttatgaatgtactgggtgcgatggttcaccccatgcgtctgactttcgtggagttctttaagaattccggttacgaaggaggcggaaaagaatataagccatttaaaaaataacaattatagaattaaaaattaaaacaataaaaaacgtaagattatggaaatgaacttattgattgcctacattggcatcgcagtaatgattggtttgtctggcatcggtagtgcctatggagtgacgattgccggtaacgcagctatcggtgctttgaagaagaacgacggtgcattcggaaacttcctcgtattgacagcacttcccggtacgcagggtttgtatggttttgccggttactttatgttccagactattttcggtatccttactcctgaaatgacagccatccaggctgccgctattcttggtgcaggtatcgccttgggattggttgccttgttctcagctatccgtcagggacaggtttgtgcaaatggtatcgcagctatcggacaaggtcacgatgtattcagcaatacattgatccttgccgtattcccggaactttacgctatcgttgctttggctgcaacattcttgattggtagcgcactggttgcataagaatctatttctgaataatttgctaacccagggttgtcattccggtgatgatcctgggtttattgtttccaaatgccacacttgaacaaggcaaatgccacacctcgttaagtgaaatgccacacttaacaagacacgaagtgtggcatttgagacagtgaactgcccttctaactatttttcgcaaacgattgtttatgcatatttcattagttttttcgattaataggctatttttcaaagaataatgtgtatttttgcagccggtattaagtaatagagattaaaagtaatatgactaaagagctgttaacccccgactacatcttcgagtcaagctgggaagtatgtaataaggttggaggtatctatacggttttgtccacgcgagcaaataccttgcaggcaaaatttcatgatagattgttttttatagggcctgatttttggcagggtaaagagaatcctttgtttatcgagtccgataacctttgtgcagcatggagaaagcatgcagctgagcaagataacctttccgtccgtgtaggacgctggaacattccgggcaatccgatcgttatattggttgatttccaaccgtttttcgcactgaagaatgatatctatacagaaatgtggaaccgctatcaggtggattcactgcatgcatacggtgattatgatgaagcatccatgttttcgtatgctgccggaaaggtagtagagagtttttatcgctacaacctgacggagacagataaagtgatttatcaggcacatgagtggatgaccggtatgggagccctctacttgcagactgctgttcctgaaatcgctacgatatttaccacgcatgccacgtccatcggacgttccattgcaggtaacaataagcctctttacgattatctcttcgcttataatggcgatcagatggcggaagagctcaatatgcaatccaaacactccattgaaaaacagactgcgcactatgtagactgttttacgactgtgagtgaaatcacaaataacgagtgcaaggaattgcttgataagcctgccgatgtagtgcttatgaatggttttgaagatgattttgtaccgaaaggaacgacgtttaccggaaaacgcaaacgtgcgagatctaccatgttgcgcgttgccaattgcctgatgggtacggatatgggtgatgatacgttaattatcggtaccagcggtcgttatgagtttaaaaacaaaggcatcgatgtctttcttgaatcactgaatcggctgaaccgtgataagaacctggagaagaatgtattggcattcatcaatgtgccaggatgggtaggtgatgcccgtgaagacctgcaacagcgtctcaagagcaaggagaaattcactactccgctggaagtacctttgattactcactggctgcacaacatgacgcatgatcaagtgctggacatgctgaagtatatgggcatgagcaaccgtcctgaggataaggtgaagattatttttgttccctgctatctcgacggaaaagatggcattataaacaagcaatattacgatttgatattaggagaagatcttagtgtctatccttcatattacgaaccttggggctataccccgttggaaagtgttgctttccatgttcctaccgtcacgaccgatctggcaggtttcggactttgggtgaacagcctgaagaaccagcatggcatcgatgatggggtagaggtacttcaccgttcggattacaactattctgaagtggctgacggtatcaaagacaccatttcggcattctcagcaaagacggatgcagaagtgaaaaacattcgcaagcgtgccgggcaagtggctgagcaggctttgtggaagcattttattgaatattattatgaagcctatgattttgcccttcgtcatgcgatggagcgtcagttaggttaaaataaatatgaattattaatcaatcaagtaatcatacaatgaagattaaagttagtaatgtaaacactccgaactggaaagatgtgaatgtgaaatctcatattcctgccgaattggagaaattgtctgaattggcacataacatttggtggtcttggaattatgaagctactgaactgtttagagaccttgaccctgctttgtggaaagaagttggtcataaccccgtccttctgttggaaagaatgagttatgctaaactcgaggcgcttgcaaatgacaaagtaattctgaagagaatgaatgacgtctatgctatgttcagaacgtatatggacgtgaaacctgatcagaagcgcccttccgttgcttatttcagcatggagtatggtttgaaccaggtacttaagatatattctggtggtttaggtgttcttgccggcgactacctgaaagaggcttccgatagcaatgttgacctttgcgcagtaggattcctatatcgttacggttatttcacgcagaccctctctatggatggccagcagattgccaactacgaagctcagaacttcggtcagttgcccatcgagcgagtgatggacgagaatggcaatcaggtgattgtagatgttccttatctggattattttgttcatgcttttgtatggcgtgtaaacgttggacgtatttctctctatctgttggatacggataatgaaatgaacagcgaattcgaccgtcctattactcaccaactctatggtggtgactgggaaaaccgtttgaaacaagaaatattgcttggtatcggtggtatcttgacactgaagaaactgggtatcaagaaagatgtttatcactgtaacgaagggcacgcagcgttgatcaacgttcagcgtatctgtgattatgtagctgaaggcttgtcttacgaccaggctatcgaactggtgcgcgcttcttcactgtacactgtacatactccggttcctgccggacacgactacttcgacgagggtctcttcggtaagtatatgggtggttaccctgccagaatgggtatcagctgggaggatctgatggatcttggccgtaataatccgggcgacaaaggcgaacgtttctgtatgtccgtctttgcttgcaacacttcacaggaagtgaatggtgtaagctggttgcacggaaaggtttctcaggaaatgttctctactatctggaagggctatttccccgaagaaatgcatgtgggttatgttacgaacggtgtacacttcccgacttggagcgctaccgaatggaaacatctctatgctgctaacttcgatgaaaacttcttgtatgatcagtctaacccgaagatttgggaagctatttataatgtgcccgatgaaaaaatctgggaaacacgtatggctttgaagaataagttgatcgactatgttcgtaagcaataccgtgaaacttggctgaagaaccagggtgatccttcacgtatcgtttctctgatggataagatcaatcccaatgcgttgctgatcggtttcggtcgtcgttttgctacttacaaacgtgctcacttgctgttcactgacctcgaccgtctggctaagattgtgaacaaccctgactatccggtacagttcctgttcacgggtaaggctcatccgcatgatggagcaggccaaggtttgattaagagaattatcgaaatttcccgtcgtccggaattcctgggtaagattatcttcctggaaaactacgatatgcagctggctcgccgtctggtatccggtgtagatatctggttgaatactccgactcgtccgctcgaagcatccggtacttccggtgagaaagcgttgatgaatggtgttgtaaatttctccgtactcgacggttggtggttggaaggctatcgtgaaggtgcaggttgggcgctgactgaaaagcgtacttaccagaaccaggaacatcaggatcagctcgatgcagctactatctatagcatccttgaaacagaaatcctgccgttgtactatgcacgcaataagaagggatactctgaaggttgggtgaagactatcaagaattctattgcacagattgcaccgcactataccatgaaacgtcagttggacgactattatagcaagttctacactaagctggctaagcgtttcagcgcattgtcggctaatgacaatgctaaagcaaaagaaattgctgcttggaaagaagaagtggtgtctaagtgggacagtatcgaggtagtgtcttatgacaagtgtgaagaattgcttcaagctactatcgaaagcggtaaggaatataccattacttatgtaatcgatgagaaaggcttgaatgatgctatcggtctggaactggtaactacttatactgccggagacggtaaacagcacgtttattctgttgaaccgttcagtgtagtgaagaaagagggtaatctttataccttccaggtgaaacataaattagagaacgcaggtagctttaaagtatcctaccgtatgttcccgaaaaactctgacctgcctcaccgtcaggacttctgctacgttcgttggttcgtgtaagagtttaatctaacaatatagagaagctgctcacgggaggtttactaaacttctcggggcagcttttcgcttttttattcaccttataatatatgtactatgagacatttacttctttcattgagttgtttgtttggtatagtttctggcgtgccaatagatgctgaagttgtgcatatatgctgattcgctgctgaaatagtgatccctccctcttattgaacaagttccgatagatgcgtgttttatttatacgactaataaaaaataattcgtatgaagaaaattgtattacttcgccatggcgagagcgcatggaataaggaaaatcgtttcactggttggactgatgtagatttgacagaaaaaggtattgccgaagctgaaaaggcgggacagttattgatagataatgacttccagtttgataaagcctatacttcctacttgaaacgtgcagtgaaaacactgaatgtggtattggatcgtatggatcaggactggataccggtagagaaatcctggcgcctgaacgagaagcattatggacagcttcaaggtttgaataaggcggaaactgctgccaaatatggtgaagagcaggtgttgatctggcgtcgtagctatgatattgctccgcatgcactgactgaggatgaccctcgtaatccgcgctttgaagcacgttataatgaagtgcccgatgcggaactgccccgtaccgagtctctgaaagatacaatcgaacgcatcatgccttactggaaatgtgtgatcttcccgaatctgaaaacagccgatgagctgttggttgtggcacatggtaatagtttaagaggaatcatcaagcacctgaaacatatctccgatgaagatattgtaaagctgaacctgcccaccgccgtaccttatgtttttgaatttgatgatgacctgaatttgcagaaagactatttcttgggagatccggaggaaataaagaagttgatggaagcagtagcaaatcaaggaaagaataaatagaatgaaatcagtatgaaatatgaagtattaggtatcaggtattaatgatgcgtggcccttaatacttcatacttaatacttcatatttaattctctagcccactaattcgttcaatatcgtgatacttagaaatactccaattgctacacagagtgctattagaatccagttggtatatttggcacttggttttgtttctttatgcagattctggtcgaagtaattcttgaagaagagataaatggcaggaacggtcgcacttgccagcaataaatcttcgggaattttgtagatgtacactttagaaaatgctatcaatgcccagtgacaaaggaaaagtattacaagcagattcactttgcgtgaaaatgccagtaacaacccgatggtgaatacggccacggagcagggcatcacacaggtggtcatcattgggaattccatgccccgtgcccatgacaagagagggtaaaggaatggcatggcatacagtatgtaagtcagtttgtcatatttgtgataacgttcaaacggagtatagtttgtaatgaggtcccatagccagataagtgcaattataccccagaatatggcaagtatataattgtaattccggtcaccacaatagatcatgtagtagacgatagaaatccagctatttaaaaacaccatatatcccttcatcaaccgctttatcagcagtgttggtttttgataaagtagtacggtcagcaggatacctgcaatcgtaataattacctggaaaatccaggttgcttcattatattgtgcgattgttttccaaaaaacttccatacgcaatcttttaatttttaattttcaacttttaatttttctcgtgtcttgtcatggagaaagcccgtttgataaacaagaacaacggtatagtggcgcccactgccaacatgaaaatgacgctacaagtaacgattgtgttcgtgaataagtctatcagatacttttcttgcaattccggtactttcatattctgcatgaacatgatgagtgagaatactattttgtaggcgtacatacccggaatcataggcagcaatgcagggatgtagagcacagtcatggggcaatagatacgttttcccaaaacaagacttcccataccgatactgaaagaagcaaatagggatgcagtagcgatatctactcccagataggtcatcagacaaaaacgcagggcatggccgatagcggcaagtaaggcaatggaaggaaaagcgcgcaagggaggatctgaaatcgctccgaaaccgatggcggcaactgcggcaaatatgccgtccgtaagtatatcaacgagtatcataataaactgtttctaattaacataagagtgcaggagagtcctacggaaatacataataccagcaacaatgcctggatgagacgggtgcagccggttagtacatgcccctcaacaatatcaatgacaccattcagcaaggggacgccgggcaccagataaagaacacttgtggcaatggctatctcggctgtcgtttccagcgtaagcgctgaagaagcaaccatggaagctacgaatgcagatacaatgaaaacaagataatgattgattttcttcttctgcataatctgtttaatgtagaaaccgatgagtgttgcggagaatacaatgagacgtgctgtccagtcgccaccaaacagggcgcagaaagaagcattggcaaaacccaccagaaacaatgtacaaagcgggtccatcttcggtcgtgatattattttctcatacttgtcccaaagtgtctccaggggtaaatgattgtcgtaggcttcccagctaagcgcactcagttcagcgttcagttcgaaactgatggggaaagcgggaataatggctacttcattgtagacttccgtgctgtcaatgtcgcatacacttaccaccatggtcttttggaaaaggctcattttcacgtctacatccagtgactttccgatgcgacgggtgtttcgtatcacgcgtgaagtgtgtacgccggaccccataagacgattagcatactccagtaaaaaccgggtaatttcttttaattcgtttggcgaattcatactttaaaatgttatcctaaattatctattcttgaaaagcgccgcaaaggtacggctttttgaggaaagaaagaaatgataataagttataattatgggaatttctgaaaggagggaggcaagaaaggagagcttgagatgatggcggcatctcaagcatactgattattaagcaatgcgaggtacgggattataattgtatgtcactacctcttctgcctgcaatgaagcctgtacgtcaatcaagcgttggtttttgcttccgcggaagcacaggctttcatctcgtagttcctgtttgaatttcccgtctaccagtacatcaatatactgcaatagtttggcctgtagcgggttgcgtagcagagtctcaaaagtatatcctgtatagcaccagatgttcttgctacttttttccttgatggcacatgccagttctgtaaatccctcaggttggtacatcggatctccgccactgaatgttacgtctgcaaaattgtcggcaagcactttcgccagaatttcgtctgtcgacatccagcgtccccggttgatatcccaggattcagggttatggcaaccggggcatctgttcgggcacccggcagcataaatggaggtccggaaacccggaccgtccactgtagtatcttctataatgtcaaggatagaaagcatgattcaattaaaaattaagaattaaaaattaaaggttggtgggagggaatgaaattaaggggctgcttcgttattgcgcagctctttaattttaaatttataatttttaattatgaatgacacggtcgttgagttccgccagtttggcattgttccagcggtcggtagtacctaccaggtaaccggtgatacgttgtaacttatcgatgtgcgtactgccacatttcggacaggcttccagattcggagtagagttttcatatccgcattccagacagcggttgcggttatggtttactgagccgtatccgatattgtactgatccatcatgtccactacacgcatgatgacctcaggattgtgtgtcgcatcaccgtctatttctacatagaaaatatgtccgccacgtgtcagttcatgatacggggcttccacttctgccttatggcgggcgctgcacttgtagtacacaggtacgtgattggaatttgtatagtaatcccggtctgtaattcccggcaatacaccgaacttcttacggtctgcccctgtgaatttgccggatagtccttcggcaggcgtagccagcacactgtaattatggtgatactgatcggagaactggtcggcgcggtcgcgcatataagttactattttcactcccagtttttgtgcttcttccgattctccgtgatgtttgccggtaagggcaaccagacattctgccaaacctatgaaacctatgcccaacgttccctgattgataacagaggcaattgtatcgtttggtttcagtttttcgcaacctacccatagggcagacatcagcaatgggaattgcttggcaaatgcggttttctggaactccatacgttcgtgcagttggcgtgcagtgacttcgagcattgcatccagttttgcgaagaatttggctatacgcaattctttatcttctatcttcatacactcgatagccaggcgtacgatattaatggtagagaaagagatatttccacgtccgattgaagttttcggtccgaaacggttttcgaatacacgcgtacggcatcccatggtggctacttcatgctgatagcgtttcgggtcatctgccttccactcttcgctttggttgaaagtagcgtccagattgaggaaattcgggaagaagcggcgggccgtcactttgcaggcaagctggtaaaggtcatagttccggtcttccggcagatagctcacaccacgtttctttttccatatctgaatagggaatatggctgtttcgccgttacctacaccttgataggtgcttttcagaagttcgcggatgatgcagcgtccttcggcggatgtatccgtgccgtaattgatagaactgaatactacctggttgccaccgcgtgagtgaatggtattcatattatggatgaatgcttccattgactgatgtacacgtgctacagtcttgttaatggcatgttgcacaatgcgtttctcgtcagacagtccatccagcggttgttgcaggtagtctgtaagttctttctgatatagatgtgaataatcctttccgttcagctcttccagattcttgatttcttcgatatagctgttgcgcacgtagggcgccagataaaagtcgaatgccgggatagcctggccgccatgcatttcattctgtgcagtttccagtgagatacatcccaggatacttgcggtttcaatacgtttggcaggacgggattcaccgtgtccggcagaaaagccgcaggtcaaaatacgatccaatggatgctgaacacatgtcaggctcttggtagggtagtagtccttgtcatgaatatgcaggtaattgccgcttacggcttccagtacttcgtcgcttagcagatagtcatccacaaagggtttggtcgtttcactagcaaacttcatcatcatgcctgccggggtatcggcattcatgtttgcattttcccgtgtcacgtcattggattttatttctataatctccagaaacatgtcgcgcgtcttggctttacgggcaatgctgcgctgattgcggtaagcgatatacttctgtgctacatctttccggctactcttcatcagttccatttctacggcatcctgaatggcttccaccgtcatttgtgcacttcccttgaaagatatatgatctgtgatttggcgtatcaattgcaaatcttcgcctttatccgtatgtaacatagctttacggatagcagttactattttctcttcattgaagcctactacacgtccgtctcttttgattacagtctgtatcatggtctcgtttttattttttagttatccattagaattgggagtgcaaaggtataaacttatctataagtttttgtttttgggaaacttttgtcggtctaaaatatgttaatcaattgattcttagaaatgtatgattgcaaagtggataactttttgttttaaccggttttgaaaagttgttcaaaatggaaaactctgtgtagtaggtagatacaaaaaagctcccttgctacacctatttgtaacaagggagtttatgctataagaataaattctcgattgtgattattcttttccggacaaagattatttcaatacttcagccaatttttcctgtagaccttcaccgtgcagcccgcgtgcgatgatggttccttcaccgtcgatcaatacagtgtgaggaatgctgcttactgcatatagttgggcaccttcgcagttccagtatttcaggtcggacatttgcggccaagtgatattcagtttctggatagcatctttccatgcttcgccgctttgatccaaagatacacctacgatttcaaaacctttgtttttgtattgagcgtaagcttctaccaaattgggcatttcacgacgacaaggaccacaccagcttgcccagaagtcgatgagtaccactttgcctttacctgcatagtcagacaacttcactggttttccgtcaggagtttccatttcgaaatctgtaaacttctggcctacagcagttgctttcatcttttctacattttctttgattttgatgattacttcatcatttgcaaattcagccggtatctgcggtaccagcggatccagttcatctacttcaaggtagtagtagttattcttcagcaaatgaacacctacgaggtttgtgatattcttagcgatacctgccttggtgatctccattgacttttcttgtaggtcattcatttccttcattttggcttcgcgctgttcgtcagtcagtgtagtatctgacatagactcgtatatagtcatcatttgtttgttcagaccgttcagttgagctctgatttcctggtaagcatcattacttggcgtaccggtagcggaatcattatcacgcgtcaggttgatgttgatgttaccgttttcaaggaaaaagtccattaatatgccttcttttcctgccggtctgtaagtcacgtaacggtttacggcagtatcttgtacacctttgaaggtgaatgtgccttttgtgataactgcggagtcaacttttacaagatttcttccgtctactttttgcaaaaatacggtgtcgccgtcagctccaccctctacagttccggttaccacgtaacctttgtttccgctacaggcagcaacgatggcggccacagcgagcagatagataaattttttcattgcttttattattaagtaaaaatatgtagctacaaagataatcaataaaaaatcccctccggcataaccggagaggattttatagttttaatcccattttttgtaatcgtgctgtgcttactattattcagcagcagcttcggctgcgggagcctctgttgcttcttcagcaggtgcttcggcagcagctttttctgcttcttcagcagctttcttttcagccaatgctttagctttctcagcgttcactttcttttcggcttccagacgtgcttttgcttcagctttcttagcttcttcgtctttagctttcaaggcagccaaaccgctttgtttgttgttcttccaagcttcaaatttagcttcagcttcagcttcgccaaatgcgcctttagttacaccacccaacaggtgttttttcatgtaaacgccttcgcgtgacaagatgttacgaacagtgtcagtcggttgtgcacctttcataacccagtcaagtgcgcggtcgaacttcaaatctactgtggcaggattggtgttcggattgtacgtaccaatcttctcaataaatttaccatcacgtggtgctcttacatctgcaataacgatagagtaaaaagcatagctcttacgtccatgtctttgcaatctgatttttgttgccattttaaataatgttttaaataaatgatttgaattatgctactatctcgtaatagcggctgcaaaggtaggactttttattttgatagacaaagagtttgcttgttattttcagtaaatcaactataaaaaaaggatgaatttcattagaaatccatccctctttttaataacgtattatctgagaatgattaattcttcggtaatgcttctttaactaccatcggacggcctccatattcagcgccgttcaatgcattgatagcgttagatgcttctgcagaatccggcatttcgatgaatgcgaatcctttagatcttcttgtttcacggtcagtgatgattcttactgagtctactgttccgtactcttccataacttctctcaaatctgattctctaaccttgtaattaaggttacctacatacaaattcataaatctaaataaaataataaattaataattcaataaacaaagtttttggaagttgttaggtcagagatggaaatactcaatgtagaggaaatacatacgtgaaataatcaaatcgaataaactttcttattgttcgggtacaaagtaacgcattctattttaataatgcatcatcttttaccatattttttttcgatattttcattttttattggatatgggagattttttacgaatatttccgtggatatctcactaatattgccagcaatgcacatattcccattgtaaacggataatacaagctgccgataatgctgatgggagaaattcccgctaatccggcagcaatcaatagttgcgctccgtaaggaatgataccttgtatcaggcaggagaacgtgtccaggatactggctgtcttccggcggtccagatgaaagcgttgggcgatgtccttggctatcggtccggtggtaatgatggcgatggtattgttggcggtgcataggttggcaatgctgacgagtgcggcgatactcagttctgcacctcgcttgccttttacgtgacgtgtcaggcgggagattatgaaatcgatgcctccattataccgaatggtctcaagcatgccgcctgcaagtaaagtgatgatgataagttctcccattcccgtgatgcctgttcccatggcgccgaaccagtcgaagaaagctgtacttatgtctgttccgcttgtaatgatgcctatgatgcctgtgctgagaatccccagcagtaaaaccaacattacatttacacctgccactgccgtacccaatacgatgaggtaggggataacctttatccattcaatcgcttgcgtctgtgcaggggctgatattgataatccctggaatatatagatacataatacgaccagtgctgccggaaccacaatcataaagttcacccggaacttatccctcatcacacaatcctgtgttttggtggatgcaattgttgtgtccgaaataaaagagagattatctccgaaaaatgaaccgcccactacaatggcaaccatatatggcagatctataccggttttttccgccagtccgatggctacgggcgtcagtgctacaattgttcccacactggtgccgatggaaagtgaaatgaaacaggcagcgatgaaaattcctgccagtaataaattgtccggcagaatactcagagtcaggtttactgtagcgtcgattgctcccatctgtttggcgctttgtgcaaaagctccggcaaggatgaatatccatatcatcaatatgatattcttattgctggctcctaccgagaattgatacacccgcttttccagactcaatccgcgcgtcagtacgatggcatagcaagatgacaacaggaatgctaccgtaataggtactttatagaaatcgtttacaatcaatgaagtcaccaggtaaaggcataaaaataccgccagcgggctcagtgcccaccatccaccttttcgtttattcgctgtatttgtcattttaatatatatatattgtaatacggaattacttcaccacagattaacacagatttccacagaattttatttctctgattttaattgattaaactctgtgagaatcagtgttaatctgtggtgaagtaattactgtatcaggataagccatttattcgctgcaaaattataaaaaacaaagagcggagcaaaatagtttttgcccgccctttatctctataattgtcaattgttatagcgttactcccgttttgaagattgcgatttccttgtaacctttcttctcgttgttcacgaattcaccacttgccacctggataatgtaatcgataaaccgttcgcaagtcttttccatcggctcgttttctacgataactcctgcattgaaatcaatccatcccggtttgttctttgccagtgtggagttggtggaaatcttcatggtcggcacatacgttccgaatggtgtgccacgtcctgtggtgaacaataccatgtggcaaccgcaggaagccagtgctgttgctgccaccaagtcatttcccggagctgacaacaaattcaatccttttactttcagacgttcaccatacggcaatacaccttccacgtagcttttgccacatttctgggtgcatcccaaggctttgtcctccaaagttgagataccgcccgccttgtttcccggagacggattttcacctaccggttcgccatgtgaaaggaagtattccttgaagtcgttaatcagtttcacagtttcttcaaataattccttgttgcggcaacggttcatcaatatggtctctgcaccaaacatttccggaacttccgtcaatacgctcgtaccaccttgtgccaccaggaaatcggagaacatacccaacagcggattggctgtgataccggagaaaccatccgatccgccacactttaagcctactcgcaattcactcaggggtacatccacacgttcgtccttgctggctttttcatacagctctcgcaacagtttcataccttcttcgtactcatcgcctactttctgcgttaccatgaattttacacggtcttcgtcatattctcccaggaactcacggaacacatccggctgattgttttcgcagcctaagcccactaccagcactgcacctgcattggggtgcaataccatgtcccgcaggattttcttagtgttttcgtggtcgtctcccagttgcgagcagccatagttgtgcggatatgccataatcgcatccactcctttgccgccggtttcccgacgcagaccttcggccagttggttgatgataccattcacgcagcctacggtcggtataatccacacttcattgcgaattcccacttcgccatttttacggcgatagcctttgaatgtcaggttcttgtgtggaatatccagcgtaacgcttgtcggattgtatgtataatccagcagtccagccaaatttgtctggatattattctcattcatccaatccccctgtttcttagtcgtgcgtgcatgaccgatagggtacccatatttaatgacgttttcgccttctgcaaagtctttcaatgcaaatttatgtccggcgggcacttcctcactcagagtgatttccgtcccgtccaccgtgagcttttctcctgccggcagtgtcacgatagcgacagctacattatctgcagggttgattttaaggtacttagtttccataattactttattatttatttgaataaaattcaatattctctttcgtaagcaagtctatcggcataaagttttctcttggtacttcctttttgaagatcaggtagtcgcacaatgctttgataccatcgaatccttgcaattcgggctgttgggcgatgagaaaggatacactgccctccatcaggcatttcacgttgcgttccagcaagtcatatcccatcagtttaaagtctgttttttgttgcttcaataaatattctccgacaatgtaaactttcgaattgaaagtgatgccattctttacgttcggatgttttctgaaaaaatcgttcagcatctgtgcgtcatcactgtctcgcttggcgtgcaggttcagttcccagatgcggcaatcggagtgatgcttcagcatgtattcacgaaatccgatttcccggcgctcttgctggttagaacctacaataccttcgtttatcttgcggaaaattacgatttcccgttccccgcctgcaagcaacatcatcattcgtgcggcaaaatatccactctggtgcgaattctgtccgaaaaaggagagggcaggctgatctttcagattagagtctatatatatataaggtatagaacgtttgttcagttcctctgtgaacggtttcgtatattgcggtacggtaggggcgaacataatcccgtccggtttctgttccaggatattccgggcaacatctccgaatgaatgataatcgaacggatcgtaataggagaggttcacggagatattgaagtccgaatacgctaccagtgcgtcttggataccggcttctacggcagtccaatattcgcctttctcatgttgcggcagcagacaggagaatgtatatttcttgttcgatgccagtgcgctggcgtacatattgggttggtaatccagctgtttcagaatttcctccacccgtttccggctggcttccgatactccgctgcgtccgtgtatcacccggtctactgttcccaccgatacatccgccattttggcgatatccttgattctaattctttctgccatcagattatttacaatttacgatgtacaatttacaattttacgttttatcatttacgcatttcacaagttttcatttatgcatttaccatttatcatctgtgctttttgcaggtcattgcctgtctcggctttcatctgcatagcccaattgtacattgtaaatggtaaattgtacttcctcttgtgtccgcacacaataataatcttaatattttcgacacaaatatatgacaatttttgtaattacgaaaattgttgtatctttgtgcccgcacacgaaggctatgaagaacgaaccttattttagtttactctccatagtatcaagttgttaaggtggtttttgaccttaaaatgacaaattgaaagttataaattaatcacatattaaaaaaataataagattatgggaaagaaagtcgttacattaggcgagatcatgttgagattgtccactccgggaaatacccgttttgttcagtctgattcatttgacgtagtatatggtggtggtgaagcaaatgtagctgtcagctgtgccaactatggacatgacgcttactttgtgactaaattgccgaaacacgaaatcggtcaatcagctgtgaacgcactgcgcaaatatggtgtaaaaacagatttcattgcccgtggtggcgaccgcgtaggtatctactatcttgaaacaggtgcttctatgcgtcccagcaaagtaatctatgaccgtgcacattctgccattgctgaagcagatgcagctgacttcgattttgatgcaatcatggaaggtgccgattggttccactggtccggtatcactcccgctatctccgataaggctgccgagctgacaaaattggcttgcgaagctgcaaaacgtcatggcgttacggtatcggttgacctcaacttccgtaagaaactctggacgaaagaaaaagcacaatccatcatgaagccgttgatgcagtttgttgatgtttgtatcggtaacgaagaagatgcagagctctgtctgggcttcaaacccgacgctgatgtagaaggtggaaagactgatgctgaaggctacaagggtatcttcaaggcaatggctaaagaattcggattcaaatatgttatttctactttgcgtgaatcattctctgcaagtcataatggctggaaggcaatgatttataacggtgaagaattctacgaatctaaacgttacgatatcaatccgatcgtcgaccgtgtaggtggtggtgattctttttccggtggtatcatccacggtctgctgacgaaacctaaccagggtgcggctcttgaatttgccgtagctgcttctgctttgaagcatactatcaatggagacttcaatctggtatcggtagaagaagttgaagcattggcaggtggagatgcaagcggacgtgtacagagataaattcatgtacaatttaccatttacaatgtacaaatagcggcaaatgacgagagaggagatgaaaaaccgcttaaaggtatttgcggtacgagttataaagttggtagataaacttcctaatactccggcaggaagagctatcggaagccaagtagttcgttcaggaacttctcccggagcaaactatagagccgcttgcattggaaagtctgataaggattttctgaataaattgaaaatggtagaagaagaacttgatgaaattgcatattggttggagttgataatggaacttgaacttgtgaaacccgaattgctgcaagatttgcatcatgaaaataaggaactggttagcataattgtaaagtctataatcactatgcgcaataagcagaatatagaaataaagtaataataacagatgtctctgtataatgtccgcatggttaaattgtacattgtacattgtaaattgtaaatcataagatggctaagtttgataaaatagcagtattgaataagatcggttctaccggaatggtgcccgtcttctatcataaagatgcagaagttgcaaaaaaagtagtgaaagcgtgttatgaaggtggtgttcgtgccttcgaatttactaaccgtggtgactttgctcacgaagtgtttgcagaagttgtgaaatttgcagcgaaagaatgtccggagatggctatgggcgtaggttctatcgttgatcctgctacggctgccctttacttgcaattgggtgctaacttcgttgtaggcccgttgttcaatcctgaaatcgctaagatttgtaaccgtcgcctggttgcttatactccgggatgcggaagcgtttcagaagtgggcttcgcacaagaggcaggatgcgatctttgcaagatcttcccgggtgatgtgctcggtgcaaaactggtaaaaggcttgttggctccgatgccatggtctaagctgatggtgaccggtggggtagaacctactcaggaaaatctgacttcatggatcaaagccggtgtgttctgtgtgggtatgggatctaaactcttcccgaatgataaagttgctgcggaagactggacttatgtaacagaaaagtgcaaagaagctctggcttatatcgcagaagctagaaaataagatatttcattttgtttaaaggtgtttaaaggggacaaccattggagttggcagatcgtgccactccagtggtttgttttttttatgcgaattattttttgaggtaataatcttgggatttgttagttttcggtttcttttttgatgaattctgagttaatcttctccggtttcttataaacttgtatattttgatctatgaatttcctaataacttgtgtattctattattttaattgatataaagttgtaaatattgatatttatccctacctttgtaaccgattcagttttcatagaattgcaaaacaaacaaattgagcattatggataggaaaaaaatgaaacgagtggctcttggagctctcattggcgcattctcgttgagtagttgtgctgacaaagatgtgtatcagggagaacacaagaacacgcctcttaatccgacagaagttttcgacttcagtatggttaaacaggtaaaggtaaatgtagattatggatttacgaatgactattatgtcattttcggactctatgatcagaatcctctgaaggaagttggagattcatgggtgaaagatgagacactggctcctgtctattctgcttctaccgataaaaaaggtaaatattcgggtactatacagattcctacggctattacggaggtatggctttatacggactatttaggaacggtttctccggttaagttgacagtttctgccggtggtgaaataaacttcaatcaggcagaatatgttgcctcattaagcactaagacaagaggagcaacatccggaggatatacttatttggatagctggaagttaatgcccggagttgattgggatggccgtggttatcctaataatatggaagatggcttgagtatgccgtctgctgatattttatatagtataaaggacacatacagtaaaattaatggtaagaaaattacggagttgcatccggaatggctaaataataataccacttctgaaatcaaaatcactaaagctacggaattaagccttgtattcgtcacaagtggagcccagtttaataatacagtaggattctttacttataccacgggaactattcctacagaagcttctattcagaaggtattggcattccctaatgcgtctcctattactaaaatgtctgataatggtaatggttcattgctttgtggtcacgaagtgaaacttaaatactggaatgaagcagaacaaaaatttgaagataagtttccggcaggtgttactgttggatggtgtttgcaggcgatgggctttaataaggggaatattgtgaatggtatgggaattcgttactcttatagttcaatgaattcggataatgctcagcgtgtggtagcattgcgtgagaaaagttctgaccagattgtggctattggttttgaggataataaagactatgactattgtgatgctgtgttctatctgaaagttgctgaatcgggagctatagatacggatggaccggaattgcctcctgtgggtcctcctagcgatttggataatacagtgacatataagggaactcttgcttatgaggatttatggccttcacgcggagattacgatatgaatgatatggtcgtgaaatatcagtctactctttatcggaatgtgttgacgaataaagtttataagattgttgatgaatttactcctgttcataatggagcctcatatgtttgtggttttggttatcaactgcataaagtgttaccggatagggtaagaagcgttgatgtgtcaggtcctgaaggctggagggttgaaactggtcaatcttatcccacaattattttgtttgacaatctcagaactgtcttgaatcagacatttacagttactcttgaattggcggatgtggatcaggcccaggtgcaacctccttacaatccgtttatttttgcgagaagtagagaggttgaggtgcatttagtcaactatccgcccactgacaaggcaaatatggaactatttaatacggctgatgatcaatccaatatttcatcaggaatttattatatatctcgatatcaggatgatatagaactccttatgccatacggaatcaatttacctacacatgattttaacattcctgcggaaaccgttaagatatacgatacttatccgggatttaaagattgggtgagatctcacggtgcgtcaaacagtgattggtataagaagaattaaatatatctgaaaataagttataaataagaagattttttgtgttgctgtttgcgcacacggaaaatcttcttatctttgcatcgcagttgtgaaactgctcatgattttgacttttaaataaattagttttgtagttttcaataaaggaattagttaggtaaaaagattcgttaatagttttttcataggctaaaatttggatttagaaattaggtaattaggtatataaaggtaaaagagaaagtttgtttttataggtaattagaagtttgatttttgggtaaaaagaagattgatttttaggtaacaatgatgcagtttaaaagaaaagcctctatggcttttcttacagaggcgagaggttcgtgagagcttgctcgtttttttgttatatacttctctttctataactattgttcggtttttatttcttttttgtatctttgttgcaattgtattcaaatgaatactttaaagcaaagataggcaagtatggaagaaataagcagtcaagatatacgttggaaacagcgttttcagaattacgagaaggcattcaaacgtttatctcgtgccatagaagttgtaaaatccgctcctgatgatgatttgttgcaatccgggctcgttcagacctatgagtacacatttgaactggcatggaaaacattgaaggattatctcacgttagaaggttttgaggtgcgttccccccgtgaaacgattcgtcaaggcttccagagtggatatatcatgaatggcgaagattggttgcaggcattggccgaccgtaatctgaccactcatatttatgatgatgaaattattattcaggtactgaatgatatctttgagcgttatttttttctgcttcaagacttttatgtttcttttaaagaaaaagcagatgaataagattctgtggcaacaatatggattgagtgaaataaacgggaagcgaatcattgatgttctttctcgtttttcagaggtgcaagaagctgttttgttcggttctcgcgccaagggcaattataatcgtggatcagatattgacattgctgtaaaaggaaccatttcaaaagatgtgctgtcggcattgcttgttgctttcgatgaaacagttctgccttattttgtagatatagtggtttatggacatatcaaaaatttggcattgaaagagcatattgacagaattggagtttgcatttattcagtgccatgaatatgaaatcagacgatatgtatgtcgcatgagagcctgcacgttttttatgttccgtcatgaaaaatgggacattttatttttttaagaagtgatgattttttcagtcattctttgtatatttgtggcattatctacataaaatattaattttggaacaggtactgcttatatttgattggattctatacgtattgtttgcgataaacatactgtatttactggtttatagtttggcgtcacttcgacggaaacccgataagccggttcttgcgaaagagtataagcgatttgcgctattaatagcagcatataaggaggatgtcgttatcatggatacagtgcaggcttgcctggcacaggattatccaagtgataaatatgacgtagtagtgatttcagatcatatgcagccttctacaaacgagaaacttcgtgcgttgccaatcaaactgcttcaggtggattttgagagaagtacgaatactaaatcgttgaaagctgctcttgagtacctaggtgaggattcttatgatatagccttaataatagatgccgataatatcataaattcttcctatcttgcagagttgaacaatgcttttgccaatccggaagtaaaggttgtacagacgcaccgtgctgcaaagaatctgaatacgaatatggcttatttagatgcaataagtgaagaaataaataactcaatattccgtttgggacatgtcaatttaggaatgtcagcggcattgataggttcaggtatggcgtttgaatacaccttgttttataaggcgatgatgagcaatacttcagtgggcggtttcgaccgggtcttggaaatgaaactgctttatcatcgcgtctttttccactatttgcccgatacttatgtgcttgatgaaaagatacagaaaactaaaaacttctatcagcaaagaagacgttggttatctgcgcaatattatagtcttggtgagtttgtccatcatttgcttccggccattcgtgaccgaaaatgggatttttgtgataaactttttcagcaagcttccttctcgcggttgttgttattagggttcacttttatattttcggtgtgcttttcaatatggtttcctgcgttggcttataagtggtgggggatattcgggctgttgttgttggcattggtgattgctattccccgtcggttctggaaatggcgtttggtcaaggcaatatgttttgtcccatactcatttctgctgatgttttttaatttattccggctgaaggaggcgaataagaagttcattcatacggcgcatggggtggaataagtgaaaaaacgcgcttttttagtcagagggcaatttttatcggaaaataatagaagtgataaaatggtaaacgaaaaagagaggtgttaccacctctctttccctacctcgaagcacggacactcttttgtccattccattggctccacctctccatttccgttcacatccgggctcaagtcccggtgccctataattctcgcctccggataatccatcttcagggctcgtaccagcactcgcagtgaatgccgttgccattctgtccgcgtatcctttgccaacccgtggcaatccagaccaccctcataacaaattccgattgaatttgcattgtgcccacgcacgtgggcaccgaccctctcgaccaatcgggtagacttgatatcaccgttacggcaaacgtagaaatgatagcctgtgccatcaaaaccgcgaaggcggtgagcggtttccaagtcctgttcggtaaaggggcggtcctcgcgcgtggcgctgcaatggatcacgattaaatcgatccttctcacaggttcatcgcatttgcgctgaaagcgccgattacggccgaagctactgcgatgattactttcaaaatcttgtcccaagtcgtttttttcataaagattaagagattagtgattaatgttcagtgactatcccagcggattctcatccagacctccgccgccttctccgccgccggaagaagagccgccaccggtggacgaactgctgtcttccgtcaccagttcgaagacaatgttgttcggtcctcccttggtggtggcaatgctgtcgtttgccagtcgcaaggtgtttgctaccttgaaacggatattgacacgttcgatattcttcaccgtacagtcctttgccacttcggtggcacgacatttaaaggtggtgtggaaaatcccgaaaccgtctagacggacactgttaccgtcggtcatcgtctggcgcatttggcggacgatcgctctgccgacgtgcaccacatcttcggccgacattccgcccaaggcttcaatgtcttgggcgatgcgttcaaggtcgaagatcttggcgtctttcggtttgcgtttcagagtgtaaaccatcggtgatttcgcgtcgccgattttcttgtggcgttgtgtgcgcactactaaagcttttgacataactttgtaatttttttaaattaaatgaataataaaatctccggagcgggggtaggagatactttctccttcagctccggtgaaacaaagatacggcaggcggatgacgcggcgagaggttccgtgaggtttcgtgaggataaatgaggttaacggaggttatgtgaggtttgcgaataataattgtaggattacttaatcttccactcgtcaatgcttcttttctccagcgagaagtttaccccgatgcgatatagcttccgcctatccatggcgaacggcttggcatatcctttttcctctatctgccgcagagcctcctcgggtgttccgtccagcttgaattctacgatatagacgtagtctttcgtttctatcaccatatccatgcggctttcgcttgtggggcgttctactttggtgtagaatcccagcatacgcatcacgatgaagaagacattctggaagtagagttcggcatcgcccacaatcttatagtccgtgtcggaaaacatggtggcaaggcgtttcatgaattgctcggggtttcctctctcaacatcgttgatgaaattttttacataataagtagactcggtatctttgacgggtgtataataaggcactaaataattgatgaacccttcggctacttccatgtttggaaagtctaagtgatacgtatcaaatcgttcctcatatccttttattgtcagataaccactttgataaatcactgcaatgggattgtccttgaacgactccacatccgtaagtgtttttgccgtgaccccctcatttgtaaggtttggcaggcaaaattcgttatctttcagtagtttcacgaggtaagatggcgtgcctgtctcaaaccaatagctcttgaacttcagggtgtcgagtgtgcagagcaggctgaacggattgtatattcctgttccgttttccacgaagtgatagccgtcgtagctgtttttcaggcgcaggcatacatcttcataggtggtgtggtttgccgttgcaagcagttgcagcggttcttcaaaattggcgtgaatttcttcctgggtgatgccgcatatcgtttggtatctgtcgtccatactgatatccttcaggttgttcaggtcgctgaacacacttatcttcccgaatttagtcacgcctgtcagcagtccgaagcgtatgtacctgtcctgcgttttcatcactgaatagaatgccttgagtgtgtcgcggtattcatcctgcagctcctcgttgccaagtgcctggagcatgggcttgtcatattcgtccacaaggatgaccacgcgttggccggtcttttcggcggcacgtctgataatgcccttgaagcgtagttctggggttacttcgcttggagagcttccatacaaattctcccaaaagtgcagggtgtcgttcagtacattggcaaggctgtgctttttgtcatatttacccgtgttcaagtccagatgcaggatggggtatttcgtccagtccttttcctgtttctctatggcaagcccttcgaagagttcccgctgcccgctgaagtaggcttcgagcgtagaaatcagcagactttttccgaaccggcgtgggcggcccaggaagtaatagctgcctgtgttagccagttgatagatcaattcggtcttgtccacatagacgtatccgccaagacggattttctcaaaactttgtattccgataggatatttcatacgactcagctttgttttgtgacaaagttagggaaatttcttgggtcggcaacaactttgtgattattataacccgttggcggaattaatttctttcttacggattatgagttaaatgataaataatcttttagacgcggatgacacggatctttttttaatccacttttatagcgcagccttttaaatccgtgttatcccgcgtcatccgcgtctaaaaaataatataccgaatggcgctaatcacttatcactaaacactaatcacttttgttcctttccatcctgtgcacatgctaaggctccccgaaaacattgactatggcttgtacctgggcgggagtgtagttcctgcccgtgcggctcattcccatttccagcaggcgttgttccagtccgggcgctttgcgtatccaggtgttgaagcggttgactgctgcctgttgggtcactccgtgaatgtagcacatggccagttcgcctttcccgtagctgcgtatcaggaagcagacttctaagatagaatcatcagttttcatcatactttaatttgaataaattgttatttttcgtgagtctattatctctacaaatatactgaatattaatcaaatatacaacgctcttctgtaatgtttttcaaccaattttcattgtcgaacactgtgttcaccggtcccggtttgtcaccgtcgggacgatgcacgatatcctcctcgcagggccagtaacgcccgttgatgcggttgtagacgaacttggcgcaggtgttggcgctgcccagatgcttaaacctcactttgtcgatgtagatggtgacgatttctttcccgtcattccggtctacggtaaagcagaagtcggccatgttgccgaagttggcggagccgttgatgtcattcatctccacccgccgcagttcgccgttggtggtgttgcggttcaccttgcgcggatgcgccacgaggataacgaggcacttgtgctgcagggcgaagcggctcagcttgttcagcagcgaggtgatgtattgcagttccgtttgtcccggttccagctgctggtcgatgcggttcagcgggtcgacgacaaggatgcgcactccgcggcggcgcaccagttggcgggccttctcaagaatgcagtctacggtataacttcccgagtccggcaagatgtgcgtcacgttgtccgtcagccagcgcgtcgtccggctgtagagggcttccgtcatgcccggtccggggcggaaggggtgtccggtcagcttttcggcgagcttggccagatggtattccatcggcatgttttcgggactgaagaagccgattttccattcgtggcgcaggcagaggcgcaggacgagttcgtcgatgaattccgattttccctcgccggtgcgtcccgtccacactgcgaggcgccccgtctcaaaggtgcagttttcgtccaggttgttccagcctgtttcagcgccccgttgcaggccgttttcgaagagcgtgcggagaggctcctgacggtcttcggcggtaaagacaccctccagcgggatttcttcagcctgttccagcgtaatgagcagactttccgcgccatactttatcagatgctcgttggcatccttgcattccggcccgaaacgtaccaagcggcagcgttcggctccgaggcgccgtacgagttcccgttgcagcagccggccggagttgtcctcgtctgtggcgatgtagatgagttgcttcggctcgaagtgtgtatccacaaaacggtccatccaggtgaggttgttctgcgcgccggcgggcacggagatcacatcctttcgtccggcgctcatgaaggcggcggcgtcgaattcgccctcggtgatgatgcattccggcgtgtccagtatggcgtcgatgttgtaggggatcagctcggcgcccttcaccatcatgaagtgcttgcggccgctgcggtacttggtgttgatgagcgtgccgttttcgaaatagttgaagcagaggcagttttccagttcgtggctttcgggcagcatgatgcattcttcagtgatgcgcagttcggccagcagatgttgcgccaagcagcgttcctgtgtccagtatcgttccaggttctcgctgagttttgtcttggcggcgtcgaagacggggcggcggaagtgggaggggagcttgctggtacggttgtatttttcttttaactgttgccgttcccgctcttcggcatcatcgggcacgtagaacttgtgaccgcagtgatggcagtagcataagcccttgtccagatcgatggagaacgatttgttgcctttgtgtccgcgggtggcgttgcactccggacagatggttttgattttgccgctggtacgaccgtgggtgtcgattccgtacttatgaaaatttctcattgtttgttgaattgttgaaaattatttttggaaagtcatttgtgaagtcgtttgaaaatgccacgcttcagtgtcccgaatgccgcacttcgtgggggcaaacgccacacttggatgagcgtgatctgtggcatttgctttgttcagctgtggcatttgccttgttcaactgtggcgtttgcccccacgaagtgtggcatttgcgagctccatgagcgtgtggattcattccagaaagcggtggcgtccggtcggggaggggcattatcgggaatagtgcagcccagataggtgcgtcggccgtcaatgcgctgttcgtagcggtaggggtcgggtggggcggcggacttctgcttggcatcaagtgccagtagggttgcgtacagggcttgcgaagtgcgttgtccgcctttggtatagtttgcgaaatagcggcgcgcatcgctttcattcagcaagtcgtgccatttgtcgtagacttcgacatgttgtttgaaacaatccacagccaccttgatgtggcgcatcagtagtgcaccgtagccgctgtgcatgcaggttgcttcgagccagggcgttttttcgaccagtccgtccaccaattcccgccagggacgtatgggatacagcggtgcttgcggccgaccgaagtcgtcgcagacggtaagcgtagtcggagaattgttggcatcattatcagcatcagcagtagtttctttttcttttgctgctgctgttattatatcttttatattctctttaaatactttgcagactatttcttcaacggtgctgtcttttagcgtgttaccttgatttttgacctggttttccggattcagctctgacgttttttgccgaatttcatcattttttgcatcggaaccggcgttttctccagcattttttgccgtttctttttccttcttcttcaccggattcagttcttcggggctgaaaaagccgtcttcttcaagattgaaaagttggaattcggagatgattttcttcaggtaactgagcggcatctttttgctcttgcagtaagggcgcagatattccagttttgctctgggggcaggcagtatggagagtttctcgatgatgatccagtaggctccggttcctctggggccttccttgtcgaacagatcttgcattcgtgggtcgtgcatggccatgagcgggtgttgcaggtaaaaatttcttttcattacaattgctttaaatttgattaattacttgtgggaaaatgttgcgtaaggcggagtagcctgttgtggcggcgacggcgttttttcgtagcgttttctcttgacggcgtcaaaggtaagcatagcccaaagattctggatgtacggtctgtccactgcttgtccgtgtcagaatagcttccggacaaggtttagtgggcctggaccgtacattagaaatgaatggttactcattgttaaaattaaggtttattatgaattgggggagccctgacaccgaagagagcattacgataattacatgcaatcatctggcggtcatttttttagcttctttttgcccggggcctggctgtatctgtgagtgacctcgcgaatgtgtcccagcgctagtttcaggcgtacgctgatattgcctttgccttcaagcagatccttcacgccttgggcgaaaagctccagtacgataaattccagttttacatggtttgtttcgatcagaacgttgaagatttctacatgatctccgttagtaacggatagctcaaatgttttttttcatgatttttgtattaataaaataaatggcggcaaaggtagaaatacccggagagggagtctggcaatttttgggatataattggtgtttactgttttgatgaaagaaatccgcggaaggtgcctcggataacggccgctgccaatcgaaatttaccgtgtagcagatataccattgcctttttaggcgcggcaatgagagaaatgtataggcaggacaggatcttttcgccgcccggtatgtttcgacgggcgtacaggatgcgggcgcgtgagagatagaattctcttaagggggttcctttcttggcagtcatgctttccttgtggtagactacggcttcgggttcgtaccataatttatacccggcccggtgtagctgtgccgaccagtcaaattcttcataaaacagaaagtagatttctgtcattgtgcctgcttgttgcagggcgtcacgacgcaccatcatggcggcgccatgcagggaggcggtttcgcatgctatccgatagctgggctggtctttttcgttgaagccgatggcggcattgcgtagtgtgatgcgtgagaatggggtaaagccggcgtattgtagtgtgtcgggtgcgtagctgtattttagcatgggcgatacaccgccgttttggggggctgcttccagccggtggatcaacgtttccagtatcggttctttgataatcgtgtcattattgaggaaaaacagatagttgccttcagctactgtcagtccggcgttgttgcctccggcaaacccggtattggtgttttgtacgacttttacttcggggtggcgcagcttgatttcatcggcttcgggcatgcgggagccgttgtccactacaatgatttcataggggtgggtttcgtgcttgcggaatgaggcgatcatttcgcaggtgtcggcaaggccgttgtagttgacggtgatgatggagaccataatattagttacgtaaaaactttaaaagtacttcaatcatattttgatatgatagtttttggctatcatagttatgatatacatcaatattgatttgcttgtttactatttgggaaagaatattgcttaaaccgatattgtcttcctgctctataaaataaccgtatttttcttgctctattaggtcttcagcagcaccggtacgtgtactgattatgtaatttctaaatcgtttcgcttcattcagtaccagcccgtaactttctctacgtgaggtggacacaaatattttagctttgttataccattcccataattcttttttattgtcgatttttcctttaaagataatttgttttcttttggaaggataatttttgtaaaattgttctataatgctattgaaatcattttcaataggacctataaagcaaaatttccattcttttaaatctacatcttctaatgcttttaaaagcatttctgtatttttctgtgaagttcccaaccgtcctacggtaatcattaggttttctttttcatcgtacattcgctccttaattcttaatatgtttagatgtgcttcatcaaatgcattgggcatcaatacaagtttttttctcagttggtctccaaagtacttattatggcatagagaattataaggttgtgacgtttcacatgaaattacatttactttacttaggcaactgttatatattatttttcgtatagttctacctataaaagaacatctggacaaatcccattctttacctgattctgtatctaattttacataaataagcccatctctgtttaaaattttataaagtaggatgtttacgaaagtttctaatcgccagtggaaacacatcaataggttgatgcgtgaagcattttgccacaagtactttacataaatgggaattcgctggagtggtttatatcctaatggtcttcttacaaagtgcaaatcctttttctgtcttttggaaatttgtgttgcaatttcttcggaatagccacaacagatttctacttggtatcctaaagcttgccccaaataataaggtactaatacaacatctttaccgaactctaaagagttaagtttcctccaaagcaatgtaatgttctttttttgttccatttgtttaatttgtaattttttccgctttttctagtgcctctaagaaaaatttcccttcactaatcaactgaccaatagattgtgcattctttttatatatattataaaccttttggtccatacagttaatgatatcggcagcatcgtgcaaggaagatacgcatatcccaactttgtatttatttacaaatgatgccatgccactttcttcccaaacgataacaggaactcttgctgctaaatacagcccacatttatgtgaattattaaaccgcaaataggtgcctaaaagaccgcaacaagtattgatagaaatgccatcccaaacaagtccccatgtgcattgggatatattttcaattagttcgtcaggagcttttttccccataaattctatgtttctatcttttttttcttcagtattgcttccccaaattttaaaatttaaattgacggaagataattcattaataaaaggagccttatttaagtttccagcgaatgctacagatttctcgttaaaaaccatattagtagtatgctcagaagcgataggttcaaagttatttaagtaatcccaaattcctatagaaactaaatgattagtgaaatggtacttattctgtaaaatctgaattgagttatcattaggtgccaatatgatgtcagcaactgcaatactgttcatctcagcatgagcatattctttgcttttttccattcgcatggattcaatatcattaataaaacaaattagcttgaaccggatgattctattgaaaaactttagaagctttatgcgttgaaaattacttggtacaaaatagagaactgttccgtttctaccaaccctgaaacataaggtaaacaacagaattgggatatctattaatttaataattttatttgtcctcgtaggtaaagccaaaacagctttatagccttttgaatctaacaaagccataatgtctttcattgctttggaacctgcattgggatttgctgaaatcccaaattttatatagtatttactcatctttaaatctctgtttttatttaaaccaaaatacaatccaatttttatatgtaacatattgggagatattcatacgtcggaaacggcatgcggtttctatcttctcaagcagagtcattctgtgtcctaaccaaataactgaattatatgtttttgttaaatataaattaataacagatctccactcatcgtttagttgcgcccaattgtgtattcgagcgcataccgtggtataaccgtcaatattacgcatactgaaatcattggtcattgttgaattagcacgcactctacgtttaaaatatggttgagaaatataacgaatacgttgggcattcagtctgatttgcacagcaaatgcatggtcttcgtgaataattccagggggaaaaccactgaaacaacttttgaggaatggatggctagtgaaacataggcatggggaaactataaatatattgtgttctaattcatagttaaaaagttccattccattccataatttattttcattaatgatcccttttctgcaataggtgaaagtatttgaagtatctggggctgagataacagtcgcatcaaaaaatacaaaatcaagtttatccttttcacatatattgtagcattctttcaaggcgtctgtatctaatttgtcatcgctatccatgaaataaatgtattttccagttgcaagttgtaagccattgttgcgtgcaacgctttgcccttgattaggttgagtcatatatcttattctatggtctcttagagcatactcttctatgatatcaggactttcatcggtagagccgtcattgatgaggataatatccaactcttttaaactttgattacaaatactatctaacgtttcacgtagaaaaggtgcagtattgtatatgggtataataatagatactttcggaattactagaatattatcactcattttttccttttatttaagatgcttttgacttttgcaaatatattatattctttggaatactgtatataaattgtccataaaactagacagacaagagttttaataattaaagataaaattatagtatcctctttaatataaggtgttacaaaatataaagcagtgcctataatgcagcttaatataataggagataaaagttgataataataaagacgaagactgcggtgtaacatctttcgatataactgccaataacattgcacgaagcccaaaaggaaagaaatgagaatagaccaggctgtggcttctaatgaacggaaataaaagataccgatgaggatgctgactacacttgttgtagcagaaaagactccgcaaatgaacatgcctcgggtgtcattccctgcctgatagaaggagcctgaagaggaaagaatgagttgaatacctactgtgagcgataatattctaaatacaggaatagatggcaaccattgatttccgaaaaaaagtaaaattaattcatcggaacaaaagtatagcaatatgctaaggggaaagccaatgaaagccaataggcggacaatacgttcgtgagcattccccaatttgcccatgtcattttgataatcactcaaaacagggtgcattacaggggtaatgacaaaggtgatgttttgtaaagggagcatcatcaatcgataagatttttcataataaccaagcggactcatgcccatatacttacctattagtagtttgtcaagattacgggtgaagtaattgactatattaaaaagaaattggtatacagaataattccatattttttttacgcttactataccagaagtgaaacggaacttttgagggtatttttttagcgatatcaggtagaggagtaggctcgacaaaatgggctggatagtcaacgcatagagacctcccccgcacagggcaacagctactgacaacattcctactgtgatttgtatgaagaaagtacgataggcaatgaatttgaaatctttgtccctatagaagagtgtgttaggaaccatagcggcggctgagaagaataggttgactgatagtaactggcagataaagatgagctgggtgttttggtaatagtttgctattatccatgaggaaagaaaaaaaagaacacctaagataattcctaaccaaactgtgaaaatatagatattactaagatctcttttagttaactccttgttttggatgatggcagatgagaagcctatattagtgaaaatgttaaaaaaattaatgataactgtagctactgccaccacaccgaaatcatcgggtgataacatgcgagcaagtacggcagtaactattaaggaaataaatattcccgaatatttagctattgctgtgtagaaaactcctgaaaaaatttgttgctttatacttgccataacactatgagtaggaagtttgttgtaaactactatctttacatatttttttcatctgttcttcccatgatagatgtcggatagaatctcttatttcctgtggtgaaaggacttgagaatgacaaaaagttatcaactgtgatatatcaatgggactttcgtcagcaactgttttcaatacatagggcatatggtcgaagtcggtatcagtttcagagtaagtgaatgcaaaaccacgtgctgcatattcccggttcttcaaagttttgatatcatatatgccactacggtggcgtgctaaactgccaatagcaaaatcagcttgttcaaaaagggtatttaaggcctcgccatgttttgcaccatggcagatgacgtatgattctattccgtattctcgaataggggtttctatctcccgacgttctctttcgccgctcatattaccgacaagatggaaatatactttgtatttcggatgatttttgtaatattttccaagtcctttaatcaagcgatcgaagccatgccagaagtgtatttcagccacacctatcaggtgaagttctttgctaatatcgtgtattgtcttccgtatcgggatactattgaagtctatgccattagaaatgcgtatagtacgttgcccgaagatttctgtattattggagaaagtgatgattgcatcaacgtatttgcaaagcttccggcggaaaagacggtcggtgcagagttgtaatttatcaatggcggagaaatattcctgatcgtaaggataggtaggtatttcaagaaagactgctgcttttagctttttcagttcctttacaaaatgaattgtaaaaggattagcattatgataggaacgtatatatacaaacgaaatgttctcttcttttatgtattggaggataggatgaaaaaaaatacgctttttcaatttggctgttattcctcttccaagattaaccaattctttaccatctattaaccattctctgtttccattgggcgtgacttcataatggcaggtttgaatgtcaaaaccgcattttttcaaggcgtttatttggtatcttatctttttgctgatgccgttatattcttgaaaaccataaaatacaagaaaaagagctttcatatacgtgggttgcttatacaagtttataattgtaagctacggtacagttgaactaactcgttggctgtattctcccatgaaaattgctgcgcccgcattagcccgtagtttacttgtttttgatataatacattttctgtttctaacttcaacagagcatccgctatcttttccggttcatgtggatctaccattaaagcttctgcccccgcaacttccggcattgcagaagtattgccaattataatgggagttccgcatgccatagcctcaatcattggaataccgaaactttcgcgaagcgaaggataaagaaaagcaaaggcagcgttatagagcattactaagtcatggttatcaatgtaccctggatagtatagatgtgatttgatgtcagaaataccttctctctgtaatagactatcgatgtatccctctttcaaatcagcgataagcagtggacgcttgattgaggagcgctttaaataaaggctatatgcctttaaggttcgtgctgcattttttttagggtcggtatttcccaaaaaaaagagaaaatctttttgaggaatatatttctgaacaatatccatatttatgtctgataactggcgaaaatgggtactgtagccgttgtagatggctgtgatacgttcagatggaatatttagagtatggcgaattcgattacattcaaattgtgatacggtgataatctttttacatacttttaggatatgcggaactactaagcggcgatagtgccaccccatctcttggtagagagatggagtgcgatattgcctgggttccagatatatgatatcatggagtgtcagtacaagaggaactgggcatcgtaaaggagctgtatttgaagtacaatgtagtaagtctactcctaaacgttttacggttttaggaagagctatttgttcccaaagtggataggacggacattttaattcaatgatagacagatttgccgattcttttagacaatgatcttcacctggagcgacgattacaaaataatggttaccgtcatttctcttttgtagctcacgaatggtttctaaagctacaaagtccattccatgtttgttgagacggaaaatgcgttgagcctcaatagctattttcatactttcaatactttgttagcttttactttttcttgttttttctcttgaatctgaagaaacgcataacatggctggatatggaagcaaataccagaataggtaaagcccatattgcatgtttaaagcgcttgtttacttctccatcaggcagtgccattaaaaatgtaatagcaataacagctaaaagtgcataccatttgagactgagtgtccaatcaagtaaagttattccgatagcacataatgtgataagggctataagtagaaaacgggagggcattaaccattggaacagtttgagagcatagtcccactcacctctcaacaaggtaataggcaaacttttcaaagctaatattgtactactatattgtgaacgtaaccagccaatgcgctgagcttcatatccgttagtactttctgctttcttgctgtaacagaccacttctgccatgtattctgtataaatattctgttttaaaagcgctgtttccattgctttactcagatcagaaccttttaatttaggtgcaatctcgtgaaacatagcaaaatcaaatgccattgctgaccctattaatgctgcagagaatcccatacgagtatgggctttacgaaatatattattattgatttcttcactagtagcgttgagtacggcaatactggtagttaggttttccgtcatacgatgtgcttggatagcatcacatccagaataatatgcattgttgaatagattcagagcattgggtacgattcgattatctgaattgaagataataaccatatcatattctgcaggagaataacgttccataacctgttgaatggcatagactttggtacattgctctttgtcgggaacaacgatattgactggcatttgaagtaaagtaacaagatcttcttcaggcaattgagtagctgcaatggctatgtcatatttgtcccgtggatatagctgtgtgtctaggaaatggtttatagattgaataacttccttgccattgcgtaacactgtgaataatacaagaaaacggtgctgtacttttgcaggaggataaggattcttgtactttcctaacgaaaaaagtgcacagatgaaaaggtacaatactggaatgcttagtaataagaacaagatcgcatctgctatttgcaaagcattattgttctcatcggcccaccaatcgggattaaatatggaaaaaatatcgcccataatgtttatttactgtttttaagtttctaatcttttttgagtaatttgattgtctatgtatgtgccgttcataataaaagctatcatggcggctatcaaaaaatttgtaggaggcataccgggagcttcccctgtataaccgctgattaaaataccgaatgtggcacacgtaaatgcggcaagggtttgccgtagttccttgttgcgaacgcgaaacattacaatgtagcaacatcgcaataacactactgcatatattgaaatcaaaagtattactccaactattccggtttctatccatattcttacgaaataagagtcaggaggtaaagttccctcaatgtaagtgtcaccttgtgcccacattttaggaatatcttccgtcaatccaactccccacggatgcttctgtaaatatagcgctatttccttacgattttctacacgaacattaaaggaagcgtctttggcaggacgaaaagccgtacgtgcacgacgaatgaattgattgctgttacctatgtcagtaaatgcgaagaagaagaataaggcgatactaacacctgcggaaattgtaaaagtacgaagactcttgcagatcaggcaaaaaagagctagtcctgtaacaggaacagcaagtgctccgcgggtaccggacaataacataccaattgcgcccattacagctatgctaaaatagaatattgccaaccgacgattccgtgtatttagtccaataatggaatatgcaatagctactccccccatacatgttccgaaattggccgcatctgtaaagtatgaaaaataacgtattcctgtgcttagaatgtgtgtagttgctgccctgtctatgtatagccaacgtttttcagcaaaatcaaaaccgacatatttctggtaaagtacttttaagaaagcgattataatgaagattcctatcactattaaactatttcttaacattttaggagtgttggaaacaatagacgcgacaatatatagcatcaatgtccttaaaatccatattcgtataccttcggttatcccttcagagtgaatacctggattggtaaattgtattaaaatgaataatatccatacaacatagctaatggtaaacagattaaaagcattacttagtttaatgttcgctttcttataataactggcgaacaggatggcaataaatatgtagactaaaagtatatccagcccaacacttaacttctcctgacgaatatatcgagaaacagttgtgaagaagaaggcgtaagtagcatacattaagtaaataaaacgaggcttttgtaatccataacctatggtaatgatagccagcggcgagaagatcactactgttgccacaagtaggttttgtgtaattatggcatagacaaaaactgctagccccacaacaagcatgaggtggagcagagcctttggggggagtccccgcattgggtatgaattaatatatgccatatcttttttatttacttgaccgcattcttttgtgaagtcaatcccagctgtgacaatcggctgaagaaagtatgcattggcatcttagggggcagttcacccgtgaaagattctaccacttcccgatcagcattattcaaataaagcataaatggaatatcttttaacgcttctttcataggagttaaagttgcattgtcgctatttctccataaacggcatgcattagctataagtaaattaacatctgctttttgaagtacggaaaggggaacggcagcatctttaatggggggatattctaccaaaataatatccggagtctgctctgcttcattgggtacccaaaaatcgctaagttgttgagcttgtacataatttttgtttgccacttcaaagtcgtaatcgtaagtaaccaagcgtacacataatccttctgatttccaatgttccataaaatatttggctaagaaagactttccttcacgtgagttgacgcttagcaagctgataacagtaggttgtcctacttttagatatttatttaaacgattacaactatatgcggctgccatacgattacaagcttttaagaaaccacggtattttaggttgctgattccgttaaatgccgcaatgacaggcaaaccactgagtcgcctgctacgatatggatcacgtaaggtacgatctaatatctctattaataagaagtatgtagttataaatataaaacttccggcaaaggctataaggatataaatgagtcgttttcttccattatcagttaatggataggcaggaggagcaactgtttgtagattactggtactcatttctatattttttaaacgaagattagcatcagccaatccactgagctgagtacgataattatcttcagctataccaattgcacgttctttacggctgatctgtgtgcctataggagacatgtggctatattgatcaaatatatcttgctgtcgtcttttcaaaacgtcgagctcagctttagcttttgcttcattgaccaatgcagctaaccattcggttaccatatcttcaatacctacgccttctttggtgaagttgaattcgtttaaattgtccgaaatatgactgattttattttctgcctttcttaatgcttctttttctttctgtaatttcttattctcatttcgatctgatatgaaaatttcttgttccataatactttgattcaacatactgactttgttgagctcttgtagtaagttagtgttattacgaataatttgagcgcgaatatccattttctcatccaacatttttcggagagctatggcaccttcataaatacgttctgcttcttctaagcgatcctcaacttcatagcgagttccagctagtgactttgtttcctctccataattgatgacacgttcctgtacattatatttcattaagtcatcttcttcctcatttaattttattttagcaagacgtacctgttcttcaaaatatgcaatgacatcgttggttgatttaaaacgaagaatttcataagccttgattaattcatcaattaaaatactaactgttttttgagttattccgggatcagcagaagtgtatgagatttcgagtatgtcactattgtttacgcgtctaatattaatgccatctaaagctgttgcactgtaaaatgcaacaggacgattgaatattgaatatacaaaattattattggcttctttacgataagcagtgagattagctaatgttttttctacatcttttctgtccaccaatgccaaaacttctttgggagtcatttgcagtaattggcgataatgtttggattggatgtattggttgtctttccattcttcgccataggttagtgaattggctaataaacggagagaaactttttccaaagttccacgagacttagctatactgatgagattgtcaaatgtagccgtaacaacgctaaaatttatagaggcaccatccaaggatgtagaattagtgatacctgcgtagaggctactttttacagtataactataagggaggaattgggtaaagtatattaccaaccctgtgacaaacaaagttccccacaacagccaatagcggatgcggtagaaaaattgtgatatgaataacattatatcaggcatttactattcttttataattcttacgttggttagcatctcgagtaaaacaattgagttatgcagggctacacgactttgttcgtaattagtaacagcgccggttctgcgcgcacgttctagggatagggagataatatcaatttttccttggatgaaattgttttcagatattttcatttgcgcattgtataatgctgctgtctctgctttcgctttaatcgtggcaagctgttctgttacagcattataggcttccagtactcttagcttacgctcctccattacttcatcctgagtatattgtaattgttctatattataacgataattttttagctttaatggacgattgaacagatcacccaggcctatacttatactagcccctaaattaaatgtatggcgtgtaccaacacttgtcgattgataccaatcaacgagtgtctcgctattttcgtttaggctgttgaagcgaccaaatgcatagctaccatttaatcgaaaatagttccaccaattacgcttttcaatgcgatactcattcttttgttgctccacttgtgattgtgctcgtcttaccgtagcattttctattacagcatctaaaaaaatcgataacgggggtaattccaaattttcaatttcaagaggtacctcttttcctgtttgcatcacagtaactgtttcccagcgtgcatcttccatctttaaacgctctagagcttttatacgttcttcgcgcgtcattgtctgttcttgggcaacaacggctgtgggaagagcaaacaatcccgaaagagttgcgctacagtaaatgagtgtaatatatcttcttatcatttttttatttgctatacatggttaatattgcaattatacattctctttttgtacaaacgctgtcagcgtcttaaagataatcttcatgtccaaccaaaacgaaaaatcccttgcatatttgatatccaattgtttccgttcttccgctgacaacttaccagcaccacctcgtttttctacttgccacaatcctgtcaatcctgccggagccatgaagcggtctatataggcatcgctggtcagctgttcagcttcgtagagtgggagaggacgattacctacaatactcatatctcctttcagtatattgaataactgtggtaattcatcgatactgtatttacggataaagcgaccgacgcgtgtcacgcgcgggtcattctccagttttacgaatgtattgtttttagctttctctttttgcttcaggaaatcttgttccgaaaccacaaagtcatccgaaatcaataaggtctcttcttcgtccggtgtaccggccagatcatcaaaacgaatttcaggaccttcgtccgaactttcaacctcttcaatctgatattgatttaatgcattcaactctttcaatcgcttgtccgcattggtatacatggaacggaatttcagaaaatcgaaaatctgataattagaaccaacacgctgcgatttatagataacttttcccttgctttccatgcggatagcaatagcggtgcctatcaatattggagaaagtataataacagcagttcctgcaaagagaatatcgaatgtgcgtttccacataggaagacggaatgtattcaacaccttacgatgtgtttcgctgaactcttttagtttactctctttgcgtgccttgagatatgcattcatgtgttgaatactgttttcttcggcatgtggaggaagtgtattgttaacgcctgcctgcaagtaagattttctgtgttcgggttctaatgcttcggtgataagagtgatatagacccggggataacgtttacgcagataagtgatctcaatacagtctgcttcccgaacatctgtttgttcgtaaaggatggatatgttatagcgttcgcgaataccgtcaatgacttttgccgctttctgggaagaggaaacggcaacaaacataccacctgtgactttgctcagatggtcgatgataatccggttatttccgatatagatgtagtataacatatccttttacgtcttttggtcaattagagaaacttctgtaagcgcactttcaattccatgggattgaaaggcttcagaatataatcgactgctccttcttcaagcaaacggatgcgttcggtggtgctctcttcactggaaagcatcataaccggaatatgcttgaatagctcattgcttttgaggtaacttaaaaactccgagccggtcattttcggcatacggatatcggatataattaagttcggctcattaccttcatgcaaccattcgatagctttcagagggtcttcgcaatacacaaggtcatactcttttcctaaatacatcgagagcactttgcctatggaggctttgtcatctactaataagatctgtttcattattgtaatttataatattctatacctgttatttataatatggttattctttatctgtaaacattcttttcgttagggtggagatgccaatcctcattttcaggtgtgcggttttgggcccacttcaaaaatagagggtatgcgcaattaccgtctgttgtactaatgttgacactttcttttggataacagaaattgggtacacaaatagcccatgtattgttacctgctaactcaagattttctttctgtacggttcctcccttggtggcgccataatcccagaattcgtaaagatgcacttccatacgttgctgcatacttctgaacttataagcaatgaaaaaatcgagattgtctttggatattaccggagactcacgttggtaggcattgctctgttcaatctttattttatatgtatatgtgggggctgttgcaatccccgtattgatcatagtgccgggagtgacaccgaatacactatgcacatttccgaagagaggaattaccataccatcttcaaagttgacgttggctaatacagaaccggataacgtgttctggaatcggtttacatctccttcatagctgatgtttgcaatggcggctctatctacattcaccaaccgtaaaccggccccaatggttttggttgctccggctgctgcgagggtgatgtcaatattcgtagttgttatcttgttgtcactactgcggtcgtgattgattgagacatccaatacgacgtcgttgaagtcatagtcgcccaccaaggggaaattgtcttcgaagacatatgtatagggtatcggaccggaaggagtttcactaccttctcctgggttattaccctcacccgtgcagtctccttcgggaataacaacgggggattctccccatttggaaatagtactgcctgtattggtcaggcattttacaaactgtttgtacttgtctccttcatgttcttttatttcgtagtagacagcaccttcacttgtcatttggttaacttctttaatttcctcgatcttaacgagagagggctttgctgttcctttaaaccttgttttaccaaatttgccttcttcaatagtgagtattgtatttgctccaaggctaacttcggtatcccactgcggattgaactcttctattttagtatagcagttgtcacccaatactaaagataaacccgtaaatttttcaaccgtaagaaaacagccgttttcaatggtggtttgggtatacgtttcttctatttccgtcttaccttggttgacgaatttggtgcctctgttatttatgttcaatttgtcaacttttacagtgccacagttgtagaaggtacatcctggtgtggatatatttaaattttctaattcaatggttcctgcattatagttatattgtcctgccgatccgttggtcaagtctatcttttcaccgctgacttttccacctttgtaaatgaacagacggctgttgtttttgatagataaggtttgattatcaggaatagaaatttctccaccattcatgacgcatacgtcatagcccttttctatatccatgttggtaggaatccatttccctgcaataatgattgttgccggttttccgtcgttgagatgtttgtttatagggcctttataagtggtcgcttcagggataatgtatgctttcccactttggaaaaattcccatttgttagcgtcatctaccgtgataacagcggcttgggggattagtgcctgtacttctgactcagaacgttctggctcataagtggtgatactgttgtttacagcgcgggtaaaggtacgtgtggtcggtgaagttccgaaagttacatttagtgtaccgttgcttattgttgcgacttttaccacgttgcgattggcggcatctgtgcggcaaacataaacttcagtcagtgcagttggacaatccatttgggtagtgaaaggcagtttatcattagcggtaccttttgccaggactttcgcggaactgtttacttctaagggatcagcgtcataaatacggatggaataatcgacacctgtgtcttcataaacggatatgttgactgaaatcatattcgtcatcttccaattcatgttggggtcgatgtcctttaccggaaatttatcttcgtaagtcgcttttactttttcggggtcgaatgagtttttctcacaactacctaacagggcacatgataaaatcagtgcagttggcagaatatgatttgtcttgaacttccttcccatgatctgtttgttttgcttgattaataacaaaaatacggactattaagataataatagcttttataagctttaaaaagataactcattagtatcttttaactatatgatggggtatttgaaatgataccctctcatattactgaaaaagccgatgaataaaggtattcaccggctttttgtattagggaatatttaaactattttttgaatacctggccattgtggttattgtaccaatctttgttttctttgccgccggtggttacccaactaacaaagtctgtgtatacatctttgatgttcttgtattctaaaggccatgcaaaatctgttggaataacaatcccccatgctaagttttcagagctcaggtaataacgttgctcttctacagaagattggtcgtttccttgtccgaacaacttggtgttgcccaggtcggtaggtgcatgaccggctatgtgtatttctatacgcttagttttggtgtctgcttctttagaaatagcaaatacatcaagctggttgatattgagatccttgggttgcactgcaccttttctgaactctatggatatttcaaatttagcgccgttcttattgttgctgttatttgcaagggtattgacataactcctgtcattttctgaattgcctatgaagcggtgcgcatcattgcaaatgatgattacaggattgctttgattggcttcaaaactcaatggagtggaattacttgtgacaccttctacgatacctttcagctctacaacattggaagctgcaaatcccaggaactgaatgcctaaaccgagtttcttgctggcacctacagcttgtaaggttccgttgagtgtgtatgttcctacagagccgtcttcatgctgggcaaaagttactttatcgatagtggctacaatgtcattcaaatcaaagtcaccgtaagtgggccaattgtcttcgaatgcaaaagtatagttggttgcatcttcaacgatgatcgggaattccggatcacttgggtcaccaccttcgttgccaccgttgattataccgctacaagattcgatggaatgtttggattcatcgtaaccggtggtagcacatgtaacgtcaagctgtcgatattcgtttgtatcttccctctcaaatactaaatttccactaatactggtttttccgttgttttttagtgtgagctgacgaatttttatcatggatatttcaccttgttcgccaacgatgttgttgggtgcattgcctaaaatgaaattatcagcttttatgattgagctgtttctcattttggcatcaaccttttgattacaggtgatggtcggaacaggtagccattcgtttgctgtttgactccaatcacttgtaatagatccattatccaaaattaaattaacgaaagtaaattcatttctgatgataaatgcacagctattatatatatcacctactgctgtgttatagaaatcagtaagttgaacaagtccatcgttataaactgaagcgccattgttccatgttgatcctgccaaagtggcttggtaatgattgatgaaacttgccgtacctgtattgttattggttgcaagtgttccattgaatttcacatcaccatagttggatatctgactaccgttgatcaggatatcttcgcaattttctatatatgatttatttagtacggtagtttttataaattcaagtttacccgcgcttaatacaccgtagttaaatacttgagcactattgaaatagcctgtttctgtagctttaatacttccgttttcaccaatatatatttcaggtgtgccaatatttacctttacgtttgttgcattaatggagccgtagattttggctggacatcctaaatagaagatgccgccttgggattcaacacttcctccactttgaatagtaagggtgttttgggcatcgattgtgatgtcttttgaaccaattatcttaccgccattcatcacataaatatcaagtctggaggttagctttttacccgatgcagacaaatcccatactccttgaacaaatacagttgctctgccgctgctttcgtaaactcgtatattgtctttgaaaggaacgtcatctgtgtattccgttccgataatgaatttagctccggcgttcaaagctcccggattatactgaacataaccgtctgaaaccgcgggtacttcaggtattatttttgtttcatcatagagaggcttgatatcttcgctgtccttatggcttggttctatgaagcctgctcgtttggcggcttcgaatgctgaacctgtatttcctgtagctcttgtgtcaactccggtatagtacaacttgcaattcattgagccgccattctcgggaactgtacgtgcgtacacttctttccgttgcttcgggtcggtctgacgaatgtatagtttctcaatggctgtaggtacattgatttctgtgatgtaacttgtgttcccgtttgttacacctgctgcaattggcgttgcatttttatcatgcaatggattggtggtgaatacttcaatcaagtacttgtactgaccattgaagtcgtcctttacctcaatattgagctttactggggtaatcatagtccaaccaaagccatccggggctgcaaagccttccccgaaaggattttctgctggaggtgcctgcggttccttactgggatcgtacacgtcacccgcgcaactggctaaaaatatggtgcttaccacagtagccattactgataatcggttaattagtctcatacttgatagaataatatatatgaattatagcttattttttattaattaactgtcgaaaatgtgcatatcttgcatattctcgccacaaagataacgataaatttgatataataacaaaaaagttgtttttttgtttcaataagatgctttatttattaaaaatgagtatgatatatataaatggagaacttgtaaattttatccagtgatttttttgagatatgcaaaataaagcgggttatagtcaataaaaaatgttttattgactataacccgttgattttagattgaatattttttatctgctatttagtgatttctcccgcaagatcagagttcatccggtagcggatttcggcttgattgagaccatggccaaggaggaacataagtttggttactgcacattcgggagtactgtcgtatccgctgatgacgcctgcttgcagcaatttcagtccggtttcgtaacgtcccatttcgactactccacgttggcattgagtgatgttaacaataatgatgccacgttctgtggcgtccttcagttggcggatgaaccattccttctgaggagcatttccagaaccgaatgttttgagtacaaccgctttcagacccgggacatggagaacagaattgatgatgctttcctggataccgggaaaaagagtgagcataaccacattggtatcgaacaggtaatgaggcttcatgggacgcgtcggatcaggacggcggatgatgtgggcgtcatatttgatgtggatgcctgcatgggccaatgagggatagttgaatgaacggaatgcgttgaagttttcggcattgatctttgtggtgcgattaccgcgcatcaattcattttcaaaaaagatacacacttcgggaacgatgggagtaccatcgggattctttgccgcagctatttctatagaggtaataaggttttcttttccatctgtacgcagagtgccgataggaagctgagagccggtgagaataacgggtttagccagattctcaagcatgaaactgagagcagaggccgtataagacatggtatcggttccatgaagaatgacaaagccgtcgaagtaatcataattgtagttgataatctttactatttttgcccaaagcgaaggctccatgtcagaagagtcaataggaggatcaaactgataggaagagatgcggtaattgaaacgtttcagttcgggaacatgtttgagaagatgatcgaagttgaaattttcaagcgcacctgtctctgggttctctatcatgccgatggttccaccggtataaattagcaacacggatgggtagtcagtcttcataaacataaccgggtttgattattttgggtgcaaagataggaaaaaaatagtgattaggggtaagtggttagtgataagtgacattttgccattacaatgtcatttacttatcactaatccactcctttccaatcacttcttcaacccttctttcaactgtgtgatcgccttttccgcatctccttcagcttcattcagcagggtgacgaatcggctaccgatgatagcaccggaagagttggcacaagcggcatcaaatgtctgtttgttactgatgccgaagccaaccatgcggggattgcgcaggtgcatatcctgtatctttttgaaataagcttgcttctggctatcgaaatctttctgggcaccggtagtagcagcgctggataccatatagatgaagccgtcggtatgttcgtcgatttcacggacacgggcttcgctggtttcgggggtgatgagcatgatgacacggatatcgtaacggtcggcaataggtttatacgtttcttcgtaatctttgaagggaagatcgggaataataacgccgtcgatgccacattctacacatttctgacagaaagcctcgaacccgaatttcatgatagggttgagatagcccatcagaatgagggggatacggacatcgctacggatatcgcggagctgctcaaacaaaatatgcagcgacataccgttgcgaagagcacgcgtggcagcttcctggataacaatgccgtcagccatcgggtcactgaagggaataccgatttcaatcgaatggaccccattgcgttcgagggtgcggatgacgtcggcagtaccttccagggttggacaaccagcacagaagtagatggacagcaagtttttagggctgtcctgaaaaagttgatttatacgattcatgatgttattctaaatttaattcgttcttaattctttgagaaaacgttcgatccgttccacatccttgatgcccggagatgtctcgaagcgactgttgatatcgataccggcaaggcggggatggtggaattctttcagagctttgacactgtaagaattgataccgccgctaagcaggaagggggtactgccagtgtaacgttgcagaatgctccagtcgaattgctgtccggagccaccgtagtggacggtacgtgtatcgaacagatagtagtcgcagaaaccttcataatcagatacggcaagaagatccttgggcaaagcgatggaaaacgctttgatgatccggataccctgtgaatgaagggtgcggcaatattcgggtgattcgtcaccgtgcagctggacgtagttcagaccgaaacggtcgacatacataaggatgttttctttggtttcgttgacaaaaacaccgacacgtttggcaagcgtaggcaggtacctgggtatctggtacaggtatctgggggatttggggtagaagataaaaccgatcatatctacacctaatacttctacatcgcggatattgtctgcatcggtcattccgcatactttgatcattgtattcatgggcttatgtaccttaaaaatcacgaatatatgacattatgtgtgaatttccaaatttatataccgtgaatgagttcttccaatgtgctcccgggatcgtctgtacgcatgaatgtctctcccataaggaaaccacggaagcctgccgagcgtagttcacggatggtttcagggtgcgaaataccactttcggaaacgagcagcggaggcgtctgaaaatcaatttcagcaacagcattttttaactcttctgcaatgcggaaagagttttctatgttggtgacgaagctgcccagattacggttgttgacgccgaccatatccgtctccttatatatataggagagttcggagatactgtgtacttcgagcagaacttcgagcccaagttcgtgtgcctgcatggtgagtgtgtggcactcgtcaggtgtgaggcaggcggcaatgagcagcactgcatcggcacctacaatgcgggcttgcagaagctgatacttgtcgatgatgaagtccttacgcaggatcgggatgttgaccagagggcgtgctgtacggatgtcacgcagagttccgccgaagaacttttcatccgtgaggatggagagggcggaagctccggcagtttcataagcaggaggaatgaggtcggcctgtgcgctttccttgatccagcccttggaaggggaacggcgtttgaactcggcaatgatgccggatgaagagtttgcgagtgcacgcttcatgctgcggacgggcgttgtgccggaagctccggttccgacagtttcctgcatcatggcagcagcttgctcttgcaattgactgagggagactgcttgtttttgctgctctatctcaatccgcttatgggcgatgatttcggataaaatatctttcattgtttttgttttttgagttgacgagaggggggagaagttgacgagttgacgaggggggaagggctgcgctgtacttgtgagcgaattcgcccagccatcatgccgaaaggccttgtccccttgttaactagttcccttgtcaactattaatcattataaacttcttcaacgtctccagcgcccgtccactctccagcgattggcgagcgatggcaatgcattcttcgatttccttttcaggttccatcacctggatggcgaaggcggcgttgacaatgacacattgtgtttgggcacgtgtggcacggttattaaggatgttatcaaagatgcgggcggcatcctctttacaggctccgccgaagagctcttcgggttgtgcggcattgaaacccagcgcttgcggacggtaaatccgttcgtaattgcgcgtcataactttgaattcgtccgtgagggagatttcgtcgtagctatcaagactgttgactaccgcaaaatcgataccgagtttgtaaaaaacatttgtgtagagtcgcatctgcgcaagatcggccacaccgagcaactggtaagtaggcttgcaaggattgacaagcgggccaagaaggttgaacagtgtacgtactcccaatgccttgcgcacagggccgacgaacttcattgccggattgaaaagttgggcatgcaggtaggcgatgttacactcgtccatgctgcgtttcaacttgtcgggatcattggtgaagcggatgccgtgttgctccatgacattgcttgccccactgacggaagtggcaccataattgccgtgtttggcaactttgtaaccggctccggccaccacaaaacaggcacaagtggaaatgttgaacgtgttctttccatcacctcccgtacctacgatatcgataggccgataaggcgcgaagtcgatagggatgcgagtctccataagggcttcgcgaaagccgattagttcatctactgtgatgctacgcatctgaaatacagtgagtaatgcggaaatctgtgcttcggggtaagcttcccgggtgatgttcaagagaatttgcttggtttctgccgaagtaagctcttcgtggttgaagagacgggttaatatatctttcattttcttatttacgattagacgatttacaatttacgattgaaaattctgttgtgttcggaatgcctcactttagcgtttgaaatgccacatgttaacggtcatgaggtgtggcattccgacctgtgaagtgcggcatttagcctcatgagatgtggcatttcagacgcctttcagccagttgcctacaatctgttttccatcgggagtcagtaccgattccgggtgaaattggatgccgtgaacatcgtattcccgatgtttcagtgccatgatttgaccttcggaactgatggcagtgataaccaattcttcgggaaatccgtccgtatccactacccaggagtgatagcggccgactggtatttcagttggaagaccggagaaaatgtaatctttattctttatttttacattcgtttgtatgccgtgaaagacttcactcagattggtgagcttcccgccgaatgcttgtccgatggcctgttcacccagacagacgccaagtatgggtttccgtcctgcgtaagtgcggataacctctaatagtaagcctgcctcctcgggaatgccggggccgggtgaaaggatgatcttatcatatttctccagttcctcaagctcaaatttatcattgcgtagcacatctacttctgcgccgagttcttttaccagatgggcaaggttgtaggtgaaagagtcgtagttgtctatgattactgttttcatgatttcatttacaatttacaatttacaaagtacaatttttttagtacaatttacaaagtacaatttggctgcgctatgtacgccgcatggcaaattgtactttgtacattgtacatgaatttacattttctccgccattacgattgcctttttcagtgctcccagtttgttgttcacctcttgcaactcgtattcttcattactcttggctacgatgccgccgcctgcctgaaaccaaagtacaccgttgcgactgacgaaagtacggatggtaatggcctggttcagtgagccgttcagtccgatgaagccgatgcaaccgccgtaagcgccgcgattgtgcggttccagttcgctgatgagttgcatggcgcgtaccttgggtgcaccgctcagagtgcctgccgggaaggtgtcgatgaatgctttgatggggcgggcatcttcgttcagcgtaccgctgacgcggcttaccaggtggataacatgactgtaatattgcatttccttgtagaaatccacttttacatcgtggcagttgcgggaaagatcgttacgggcgagatcgaccagcatgacatgttctgcattctctttgggatcatcatgcaggtattgggcgttcagtgcatcctgttcgggatctccggtgcgcttggtagtaccggcgatggggtcgatgtaggcgtggcggccttcgatgcggcagtgcgtctcgggtgatgaaccgaagatgcggaaacctccaaaatcgaaatagaacagataaggagaggggttgatgctgcgcaaggcacgataaagtttgaagtcatcgcctacgaaacgttgttcgaaacggcgggagagaacaatctggaaaacatccccacgcaggcagtgggcaattccctgacggatatttgctttatgctgttcgtcggtcagtggggaagtggtttcaccaacggcacggaaatcgtaggcggtgtaattgcggttattgatggctttctgcaccgtatccagttcactttcttcaccgggggcaagcatttcaagaagtaccatttcgttcttaaagtcgttgaagacaatgaggtattgatacaagatgtagagcatatccggtgcgtcgttggtggcttcgcggctatcttttacgggaatattttcaaaatagcgtacggcattgaaagaggtgtagccataaagaccgcagtaattggcatattcgccttccacatggaagcggccgaggaaatcctctaaagctttttctacaggatattccggtgtgatgggacgttcttcgcgagtgccatcgggtaggcggaagatggctgttccgtggtcgatgctgacgcttgccaatggacagagtccgataaatgaacggttgttttcactgccgtgatagtcggagctttccatgagtgcactttggggaaagacgtcgcggactttaagataggtacttacaggagtgtgcaagtccccaagaatagtacgactatgtgtttgatagttatatgtattcataaccctttaatttttaatttataatttttaattattaagatacgtttctatatccttgtctccacgtcccgaaacagtcagtacaacaacatcatcgggtttgaagttcagcttttcgagggcaccgagggcgtgtgcactttccagggcggggatgataccttccagtttcgtcagctcgtaggcggcgcggatggcttcatcatcattaacagcaagtacgatggcacgtttttgtgcagcaagattggcatgcatggggccgatacccgggtaatccagtccggcagagatagagtagggctcttcgatctggccgtcttcgttttgaatgacgtaagtgcgtgcaccgtgaatgattcctatctgtccgagggcgatggtagcggcagtcatacctgtatctattcctttaccaccggcttcggcgaggacgatctgcacgcggctatcgtcgatgtaatggtaaatggttccggcggcattgctaccaccacctacacaagcgataagatagtcggggcagtcacggccttctttctcaataagttgctttttaatttcctcgctgatgacggattgcaggcgagccaccatgtcgggataaggatgaggaccgactgtggaacctatgatgtagtacgtatcggcaggatgacaacaccagtcgcggattgcctcgttggtagcatctttcagcgtcatatttccggaagtgacggggatgacggttgcacccagcatcttcattttttctacattgacatgctggcgttctacatccgtttttcccatgtagacgatacattccatgttcatcagggcacatacggtggcagtagctactccgtgttgtccggcaccggtttcggcgatgatgcgatgcttgcccatgcggcgtgccagaagaatctgtccgatggtgttgttaatcttgtgagctcctgtatggttcaggtcttcacgtttgaggtagagcttgcagccatacttttcggaaagccggcgggcatagtagagtggggaaggacgtcctacgtagtcacgcagcagttggtcgaactcttgcttgaaatcttcgctttgcagtactttgagataggtgttctgcaactcttccacacacttgtggagtatttcgggaacatatgctccaccgaattctccgtaataaccatcttgatttactaaaaaactcataatcctatttttttatttaattcagttgacaaggtttttagttgacaagtagacaagggaaatcggaaactggtaaacttgtatcttgtttccttgtcaaccaaaagaaagagccctgtcgcaggttgcgacagggctctttcttaatctatattatgttcacatatatacatacgagcactgctcccttacgactgtcggagttgtaacgggtgccaccaccaatatgtatttatgagcattgttttcattgtctttttgttttagctgggggcaaatgtaagcactttgttttaattaccaaagaatttcttgctttttttctttcaaagaacatttttcttataaagttgttctatagaggtatttagaacaactattattcacaataaaaaagaaaggatgaactatgaagcgaaaacatttagttgccattggcgtatcgattgctattctcttgttactttattggctattggtggccgaagatatgaatgcttggctgaacgttaattgatttttcgtgactttcttgcggagttgtgcggataaaaatgtatcttcgcaaaaaatcataagctcatgaaaggaataagtaactcatttttgcgtacgatatgtgcgctgataatcggtttggtattggtgatgtttcccaatgaggccggagactattttgtaataacgatcggtgttgtgtttctgataccggcattattaagtatcatcgggtattttgccatgagtgccgaagagagacgtcgccttcctatcgaaggaatcggtagtttgctgtttgggctgtggctgatcattatgcccggtttctttgcggatttgctgacgtttgtattgggatttatccttgtactgggtggtgtgcaacagattgcatcgctttctgccgcccgtcgctggatgccggttcgtgtgggattttacatcattccggtgctcattctgattgcagggctggttgccttgttcaatccgacgggggtacgttccacggcatttatcattatcggtatcagcagcatagtatatgcagtttccgaattgataaattggttcacattcactcgcaaacggccgaaggcaccgggtacgccgggagcttcttcaaaggctgtagacaatattgaggacgcggaaattatagaagataaatgaaaatttagttgacaagggaacaagttgacaagggaacaaggggctacgcagtgttaggctacgcggtgaaatgataatttagcgggagatgaaaggctgaagtatctcaaattctcttcctcttgggaattgctctcccccgataacgggagagtcggagggggtggagtacccgtagggggaggtggtaggtaaaacaataaaatacctatgaataataaaattaaggaatttctttctcacctaccaccccgccctttgggcacccctcctccaactggaggaggggaatgaagttactccacatatcccaccgctaaattatcatttattttagccattgttttatcagttccatcacttctttcttttctttttcgggcaatgtgttgatacgtgccagatggctgccatttggttggataaatacatgaatattcttcttgtttttcagccaggtgacgcctgcggctgtccatgggtcgttctgaccgtaaatgaagatcatcttcgggtcctgtttctttagaaactttgttattttcttacttaaagttttgtcgaaaggcatatctttcaactcttcgggaagcatcagacggtgcagatagccttcactggactggatggagagatactgcttgaacggttggacgtcataaccatagtatcccaattcacgggcagcttgtacaaagaaagaagcattgggactgtcggcggtgaaatatcccggttcactgatggcaagcagatgagagaaaatttcatcgtcagaggctgtagtagcgggtatggagctgataggagtaccccactgccacaaagcgaaagaatattccaataccgagtaatcgtaaatttcttcaatcggtgcacggaatgaataactcttttcagtacaatatttttcaaaacggggaagtaaagttgctttccgtttcaatgcttccaattggaaatcttcaattttcttgcggttttccggtgttgaaactttatgcaggaaaggctcatgacgtccatcttctactccataacaaagcggagctacgtaaggaacggaaatatctacatcatccggatagaaagtgcggtaaagcagggtagtctgtcctcctttgctgatgccggtggcgatccatttgcccggatagatgtttttgaatgcggtggtgatggcatgtaagtcgtctgcagagttctcggctgtcaggtattgccagtctttgggttcgggggtagattcaaggaagtagcgatattccacgaatatcatgttggcattgagaagttttgaaagctcttcacgatattggggacggagggcgtaagcggcgccatagccttcggtaacgatcactgtggggcggtcgaagccgacatgagaaacgataacgcgttggcgaaagctgcctttctccggatggcggtgatccagcggctgagtaaaataggtcacatatttctctgaaaactcagaagtttccagtgggcggatttctttaatggcggaaatcccgctgattttttgctccagaacggtctgtgcgaaagaagaggccgatgctgacagcaaaacaaagagtaggagtgctgcatagcgaatgtgcatgttcttcataatgaatcgtttttaatttatcatctggttttgtaaatattgacaaaggtacgaaaaagtgatatgctggaaaataaattacgatgatattttagttttcaaaaaaagagagagaactacctcccggcacctctccccctgcaaacttaaaacaaccaacaaaagaaatagaataattttattagtgatcgttaatcacttcttcacttatcttataaacaagagttccctgtattttggcagcgtccacatctggttgtcgacaatcagttccagcttgtcgatatgataacggatctcttccattgccggcacgatggtgtcgtggtaggcaatggctttctcacgttcactttcgatcttgttggccactttgcgggcttcaatcatggcatctacatgctctttgatgaaggcggtgcggtcggcaatctcttcgatgagttccaggttcttggcagacagttttgcagctttgtcgcttgggaacagctccttcatcttgtaaacgttatcaatgagatccgtttgatactgcgtggctaccgggatgatgtggttcatggccaaatcacctaatacacgagcttcaatttggattttcttagtgtaagtttcccatttcacttcgttgcgggcttccagttctttctgagtcagtacaccggtattttcgaacatgcggatactttccggcttcagatagctgtcgaagatgagaggcacactggtttcgcaatccagaccgcgtttctgggcctcttctttccattcgtcactgtagccgttgccatcgaaatggatgggcttgcagattttgatgtatttgcggataacctcaaggatagccgaaatcttcggttcacccctttcgatgagttcgtccacatcttttttgaattctaccagttgctcggctacggcggcgttcagggcaatcatggcgcaggcacagtttgcttccgaacctacggcacggaactcaaaacggtttccggtgaaggcgaacggactggtgcggttacggtcggtattgtcaatcaacaattccggaatctgcggaatatccagtttcatgccttgcttgccgctaaggcttacgagatcatccttggtactctcttcaatgtgttccaatacctgcgacaactgtttgcccaggaagctggaaatgattgcgggaggtgcttcgttggcacccaggcggtgtgcgttcgtggcactggaaatagcggctttcaacaatccattgtgcttgtagactgccatcagggtgttcactacgaaagtgatgaagcgcaggttttcttcgggtagtttacccggtcccatcagtccgatgcctgtatccgtacccaacgaccagttgttgtgcttaccgctaccgttgacgcccttgaaaggtttttcgtgcagtagtacgcggaagccgtggttacgggctactttacgcatcagtgccatgacgagcatgttatggtctacagccaggttacattcttcgaagatgggagccagctcgaactggttgggggctacctcattgtgacgcgttttaacggggataccgagcttcaatgcttcgatttccaattccttcataaaggctgccacgcgggtagggatggcaccgaaatagtggtcttccaactgttgatttttggcactgtcgtgtcccatcagcgtgcggcctgtcatcagcaagtcgggacgggcggcatacagaccttcgtcgatcaggaaatattcctgttcccaacccagataggcaactaccttcttcacttccggattgaagtaacggcatacgtctacggcagctttgtctacggcacgcagggctttcagcaacggagctttgtagtccagtgactcaccggtgtatgcaatgaaaatggtcggtatacagagcgtatcatcgacgatgaaagccggggaagaggggtcccatgcgctgtaaccgcgtgcctcgaacgtattgcggataccaccgttggggaagctggatgcatccggttcctgctgaacgagaagtttgcctgtgaattcttccatcacaccgcctttaccatcatgctcgatgaaagcgtcatgcttctcggctgtaccctctgtcaacgggtggaaccagtgggtatagtgggtaacacccatttcgagtgcccattttttcataccggctgccacttcatcagcaatgctacgatccagcggagcaccattgtcgatcacgtcaatcagtttggcatataccttgctcggcagatacctgaacatcttttccttgttgaacacatacttggcataatattccgacggacgttccgcgggggctgccactgcaacgggtttctttttaaacgccgtttctactactctgaatctcaatttagacataatactttattattgttggttcgtaaattagtgattagggtttggtgattagtgattagtggctgcgctgtatgcggcattttgcttatcactaatcactaaccattgatcgttatccgttataagctgattcaccatgctcgtagatgtcgagcccttcttcttcaacacgtttggaaacgcggagaccgtgtatcctatcgagtcctttgaagatgagaaatcccatgccggctgcccatgcacctactacgagggcgccaaatacttgtgctccgaggaatccccagcctgcaccataaaagagtccttcgctggtagacaagaaacctgtgagaatggtacctgtgaaaccgcagaccccgtgtacggaacttgcaccaacgggatcgtcaatcttcagcactttatcgatgaactcaaccgagaatatcatcaggatgccacagattgtaccgatgatgacagcacccagcggagaaaccatatcacagcctgccgtgatacctaccaaacctgccaggataccattcagagtcaaggataaagatggtttgctgaattttaaccaactgaccaccagcgcgaagaaacctccggcacaagctgcaagattcgtggtgaggaagacgtgtgagatagccattgcatcgtccgtagaggctgctgccaactgtgaaccggggttgaatccgaaccagccgaaccataaaatgaatacacccagcgccgccatggtgaggttgtgtcccggaatagctctggacttgccatctttactgtatttaccaatgcgtgggccaaggatggctgcacctaccagcgcaatccagccaccgacggagtgaacaatggtggaacctgcgaagtcgtgaaatgtggtgccgaacaaatccatcatgaacgaaccttcttcgccgttcatcaaccagccgccgccccaggtccagtgaccggaaatcggatagatcagtacgctgatgaagatggtgtaaatcaaatacatggagaatttggtacgttcggccatggctcctgatacgatagtagctgctgtggcacagaatacagtttggaataccagaaagccttctgttggtaatcctcctccatcatagaacgagaggttgaagaagtggggcattcccacgaaaccacctacgccgaacatcagtccgaaaccgatgaaccaatagagtagggaaccgaacatgaagtctacgaagttcttcatcaggatattggcagtgttcttaacccgggtgaaaccggcttctaccaatgcaaagcccggctgcatgaaaaataccagcatagcggcgagtaacatccatacagtgttgagtccgtttactaattctcctacagtgtcaggggctgatgattctacagtagtctcttctaatgtagctataacagcggttgttgtagctgatatactatccgttgctgcggaagtttgtgcaaaagtttctgttgttgtgcagagtaccataaggacagcaagagctatccacagcctggcaatgctgcgtttactatatttatccataaaatctttttgcttttagttgtacttgtattcttagttttgttaagtagctcttacagctctctggaggatgctcttaacagttgcggtttggtgctgcctggactatctttcctgttcagcattgtagagggcgatgtcgccacgttcggcggtacggatgcggatagcgtcttctatggggatgatgaagatacgcccgtcgccgatttctccggtctgtgcggacctgatgatggcttgcacggtcttttcggcgttcttgtcgcgtaccacgatagagatcaggatacgctcaatggaactggtgtcgtacattacaccgcggtagatgcgtgcctgacgggattttcctattccccggacgtcgtagtaggagaaccattcgatgtccgcttcgagcaatgcgtcctttacatcctcgaattttgtcttgcggataattgcttcaatctttttcataccttaatacatttacgttttttttagttgacgaggttttttagtttacgagttgacaaggacctttcggggtgtccgtttcttatccttgtctccttgttccctcgtccccttgttccctattcttactctctctcaaaaactaactccgaatacgaagtatgcaccctgcgtgtgtggattgaacgtcacttgtgcaaaggtgggcagcgaaaaagaatttgtgaatttgatttctttttcagctttcagtgtgaggttggttacgttgaacttgttggcatacgcaccttcccatggggtaagaccgacttctaccgaccagtccaggccaccgagtttaaaaggtgcgctgatgcctacatacgtggaataagctctgtcaccgttctccttcgtataatcatctccggcaaagtaagtgttccaactcagtgccagcggaccgaaatcatatcccagagtggcttcgaagatgtgcaccgtgctatgtgcgccatacttgaaataatctcccgtatatccgccatcctctttgtggtaggagaaccagtaatctgtaacggatacgctgaaaccgcctgtattgtaacccagtgtgaggtcgatttctctggcatcttccttgtcgatgcctaccgagccccaagctgtcagtgacaagcccttatagctgactcccatgctgggctggatacttacaccaccgcagtctgttccacgccagatgtagttgcttacaaaatctgcaccgactgaggcctccactttatcctgtgcctttgccgtgaaaggcattgttgctgataatagcgcgatggctatcattcggaattttacgcttttcattttcatacctattttaccttttaagtttagacaaattgcggatgatcagtccggtgaaactatagttttattttagttgttatctttttcattttcataccagccattttctgattcgcctcatggcttccacacaatcttcgtgattcccgaaagcggtcaggcggatgtaaccttctccgctggggccgaaacctacaccgggtgttcctactacattggcttcatataacatctgttcgaagaagcgccaggaaccgatgccattcggtgctttcagccagatgtaaggagcattcacgccgccatacactttcagtccggctgcttccaaaccctctttcatggttcgtgcgttgttcatatagtagtcgatgttttcctttatctgctgcttgcctgccggggtgtagatggcttcggcagcccgttgggtgatgtagctggtaccgttgaatttggtgcattgacggcggttccaaagacggttcagcggaatgcgttcaccggtcagggtggcggctgtcagctctttcggaactacggtgtatccgcaacggactccggtgaatccggctgtcttcgagaagctgcggaactctatggcacatttcttggcaccttttatttcgtaaatggagtggggaacgtcttcttcctgtataaacgcctcataagcggcatcgaacagaatcagagtgtcgttggcgagtgcgtagtccacccattttttcagttgtgatttggtcagcgttgttcccgtcggattgttcgggtagcaaaggtagacgatgtcaatccgtttgtccggtatctcgggaacaaagttgttttcggcggtacagggcatgtaggtcacgttgctccatttgccgtcttcttccaatactccggcacggccacacattacgttgctgtctatatataccgggtaaatggggtctgtcactcccacgctgttgtcgtggcggaggatatcgcctatgttgcccgtatcgcttttggctccatcgtttacgaatacttccgtagcgctaaaatgaatgcctctcggagcgtaatcatgtttgatgatcgcttcaatcaaaaagtcatatccctgttcgggaccgtatccgtggaaggtactggcatttgtcatctcatccactgccctgtgcatcgcctcgatgcaagccggtggcagtggccgggtaacgtcgccgatacccaggcggatgacctcttgtttagggtgcgttatcctgaaagtattcacctttttagctatgtctgaaaataagtaacttcccggtagtttcaaaaaatgttcgtttactaatgccatactttcttgttgttttaagcgttatttaggttagtgattaatggttagtgattagtgattacactggatgctgaatagggttaatcactaatcactaaccattaatcactaattatcttttctccgtcgaacacccggactgctcctccggtcatccatacgtgatccgttttttcgtcccattcgatggtaagtgagcctccatccatgatgatatctgtttttcttccggattttccggtcagtgcggcagctactgcggtggcacaggctccggttccgcaagcctgggtgatgcccgaacctctttcccaaactctcatcctgattttcccatgctccagcacctgggcaaactctacattgatgcggtcgggaaacaacggatgattttccagtttcggaccgatgctttcgaggttgatatctttaatatcttctacaaagattaccaggtgaggatttcccattgatacggtggttccggtgaatttctgtccgttggcttctatgggttgttctttcatatcggcgggacgtcccatatccacggttacggtgttcacttttccgtcttctacatggaacttcaatattttgatgcccgacagggtgtcgagggtaacggctgtttgggaagtcaggccgtattcatataagtatttaccgatgcaacgactggcgttgccgcacattttggcttcggaaccatctgcattgaaaatgcgcatactgaaatctgccttgtccgaactgccgatgagtaccaagccgtcgcttccaattcctgtatgcggggcgctccattcaaccgaaagtttttcagggctttcgatgggatatttcagggtgtttacataaatgtaatcgttgcctgctccgtgcatcttagtgaattttataactcttgtcattttgtactctgttggtggattaatctttctttttgttttatcacactgcaaagatacgacgttttgctaaattatttgtagaatacatatcttatttctattatttttatttattctttcagtcgctgcaaatatacggtattcaagttttaaattaaaagtttgcgggtgcatatttgtataaattgttatttatggaattatttccgcatattcattctatgtaggtagtggcgtaaatacgtgttttaagtgaaaaaatggagtttatggggtgaaaatgaagatttgtatatgacagaatgaaattgttttcttctttttgctgactaaatgatcttttgtataatgccacactattacaagtcaaatgccacactttagcttccgcaatgccattcatttgagccatcgaagtgtggcgtttgaattgttgaggtgtggcattgggggagttaaagtggggcattggtacagattgggaaagaaaggaaggaaaccagttgacgagttgacaagggaacaaggggctgcgcaatgcttctgtgccgcatggaaccttgtccccttgtccccttgttaactcgtcaactttccctcaaaaccgaaaataaagaaataaatttaactaccgatctgcattacttctttttcaatatctcctgcaataatactggttcgttggtggtgatgaaatccactccctggctgatgagccattccatatctttggcatcatttactgtccaggcgttaactttcatgccaaggtcgtgacattctttgatccactcgggatgttttttgaagacggagaaatgataatcaggaccagcacaacccatgtctttcagttcctgcggattgaggtcaccttccagataatatacgggagtacctttaggagccaggcgaatgaattctttggtcgcatggcgtgagaaagtgatgtattcggtacgctcttccagtcccatatccttaatcattttcacaatttgctctacggcgagcgtttcccgttcgggagtcttgtgtgctttgagttccaggataaggcgggttttcaatcctttggctttatcgaggtattgctgaagggtagggaggttctcaccgttgtcgagggtgatagaggtacattctttctcggtggatgtttccatgcggacacctttgaatacaccgtcgtggtctacgataagtttattgtcggcagtgagccagacatcgaactcggagccgtagcaatggatggagtcagctttcaccagggcggcaatactattctgggcagaaccgtcggtcttccagaaaccacggtgggcaatgacttgggtgttttgggcttgtaggatgccgcatgcggcaagagacatagcggaggcaaataaaagttttttcagtttcatagttccttatttataattctgccgcaaggtacaaaatatgtctgaaaagtgatgtttcatttatgttattaatgcgaatcaagagataaaggtgttatctcctttacctcctattacctgcgtatacggcgtctgcgcctgcggtgacgtttcttctgcttataaatgctgatccgtttccagacaatccacacaaacagtatcccgaagactgcaaagataagaagcacgatgcctgtattcaggttatcacctttcacgcggctccacatttcgagaacaagctctgtgcggtcaccgaaatcacggatcatggcgcaacgctccacgactttacggtcagggtattgtatcggattgatctgaacgctgtctgcaccgagaccgaagaaataactaaggtcggagaactgttcaagagtagtgtcgatctttgcctccataatctcgggtgttgctacggcactgacgtagccgatggcatccatattgcgcagagcaatatccggctggcaaagataattgatgaagtagctggcggcttttacgttgcgggcatacttggggatggcccagccatcgtaccagatgttgctgccttcacggggaactacatagtccaggtccacgcctacagcttccgcttcctcaatggcccagacggcgtcgccactccaggtaaggttgagccatgctttgtttttcgtcatcatttctttgccgaagtcggcttcccatccggcaatgttgggttttagatctttcaggtattgctctgcaagggcaatggcttcaggggaattgtcgttcatcagttgctccacggtgatggtgctgtcggcaagttgccgggcatgggcatagatgatggcagtgccgtaggcatcgcggtaactgtctttcatcagaatcttaccacggttggcggcatcccagaggcatccccaggagctgacttcttcaagggtcttgaacttcttgttatagagtattccggcggtaccccacatgtagggaacgacgtaatcattggtgtggcgaccgggctggctgatcttctccaactctttctgaatatacggggagatgttggggatatagtccggagtcttcccaaaattgcggttgatagggaggaggagatctttcttcaacattcgttcgatgatgtattccgaggggcatacaaggtcgaaatcttcctgtccgcgctctatcttagtgagcatgatttcgttgatatcgaatacctggtagatgatgcggatatcttcacctgtctgctctttgtaccaggcaggaaattcggcgaggacttcttcgtcaatgtaatctgcccagttgtatactttcagtacacggctgcgcttctcactggcaccggtacaggaggcaaggagaagaatgcagagaaggaggggtatgtatttcttcattgtttataggggttataatataggtaaatgataatttagcggagcgaaaatgaaagactaaagtatctcaaattctcctcctctcgggaattgctctcccccgataacgggggagtaggagggggtggagtacccgcagggggaggtggtaggtaaaacaataaaatacctatgaataataaaattaaggaatttctttcacctaccaccccgccctttgggcacccctcctcccaagaggaggggaattgagatagtcagaacataaatagctacaccgctaaattattatttttcattctttcttatttctttctgctctcttattaatcacaatcagcaatactaacaccgttacaaaaatgattgttgacagtgggcgcagttcaggagtcaatccacccttacgtgcgtccgcatagatgtatgtcgacaatgtttccaatccttcatttccgatagtgaagatcgttactgcgaagtcatcaatggaaagcgtgaaagcgaggatgaaaccgctgatcattcccggcagaatttccgggaagatgactttgcgaagcgcctggaaaggagtagctccgaggtcgagggctgcttcgtatacattctgattcattttcttcaggcggggcatcacactaagcaccacataaggggtacagaaagtgatgtgtgccaatactaccgtagtaaatccctgcgaaatgccaaagctgacaaacagcaggaacagggatacacccgtaatgatatccgcattcatcatcggaatagcattggtgaaattcatcacctgacgtgcccgggagcgcaagttaaagatgccgatagctgccaggcttcccaacagggtagaggctgtggcggcaatcgtagcaatcgtgaatgtgttccagatggcattcatcagtgagtggtgcatgccgcctgtaaatagtgaactgtatagtttggtagagaatcctgtccagttacccagtaccttggcctcggtgaaagagaagatcataataatcaggatgggcgaatagagcagggcaagcagaaaccaaagatagcctttcgccagaatacgtgtcatcatatcacacctccgctttcattttgtgcactgtcgtcctcgttggtaaagagggcggtgacgccaatcagcaacagcatgatgagcgacaaggcagcgccatagttccacattccgttatatatattctcttgtacggtagtaccgaacagtttgatgttgttcatcgtcagcaactcggcaatggcaaaggtggaaaccgtgggcatgaaaaccatcaccacaccactcatgatgccgggcatcgaaagggggaggatcactttaccgaatacctgtacaggcgtagctcccaggtcttgggctgcttctatcagactgtcatccatcttctgcaatgtattgtagatagggtatatcatgaacggcaggaagttgtagaccataccgaataccaaagctccttcgcccagcggcaggttgaggaaatcaaacaatgccaccgtggcaagtgtacgtatcaggatgttcacccacataggcaggatgaacagtacaaccatggtctgggaagtgttgaagcgcttctgactgagaatataagcagccggataaccgagcaggaggcataccagagtcgtgatgacagctattccgatggagtagacgaatgtgttgatagattcgggatgcatcatgaatttgcggaagttggcaaacgtgaatgcgccttcagcatcggtgaaggcataaaccacaatgagcaacagaggcatcacaacgaagatgatgagaaacaatgcatagggaactgtccagttccggcgacgcatgaagaaacgggatatattactgagcacttcctttcttattagcagattcgacaatagggatagaactggtggtctgtgccggcgcaacaattcgtatattttcgggtgcgatggtgatgccgacacggtcaccgtcgtcccagacgtcagtggtgtctacaaagatatcctcgtcccaatcagtaaacacggtgagatggtaatggtttcctttataaaggatgaatttcacttcgcccgtcagatggccgtcttcttcgttatcttcgaggatgacgttccggaaatctatttctacgaggacggaactgcccggttcgatgtcctgcacttcggcacactcaaaggtgtaaccgaggaattcgacgtgtgtggcgtctatgagcttgccttcgaaggtattacaggtgcgttctttcttcattacgtgaatgtcgaaaggtttcacgagcagactgacttcccgtccggcttcgaaactgtgatagtcctgcaccatgaattcgtagccctcgttagtctgtaccatcatttcgtaatgcacgcctttgaagatgcaggaggtgacagtacccatcagttgggcagcggcagaaggctcgaatatatagatgtcttcgggacggatgactacatcgacgggagtgttttcgccaaaacccttgtcaacacattcaaattcgtgtccggcaaaggatacggctttgtcctgaagcatgagcccgttcaggatgttactttctccgatgaaatcggcaacgaaagagttgctgggttcgttgtagatgtctgtcggcgtacctatctgctggatgcggccttcgctcatcacgacgatggtgtcgctcagagtaagggcttcttcctggtcatgggtgacgtagacgaaggtgattccaagcttctggtgcatctctttcaactccatctgcatgtctttgcgcattttgaggtcgagggcggcgaggggttcgtccagtaacagcacttcgggttcgttgacgatggcacgggcgatggcaacacgttgttgctgtccgccggagagggagtcgacgtcacggtcttcgtaatccgtcatacctaccatgcggagagcttgtttcactttcttgccaatggtggcttcgggcatctttttgagcttcagtccgaaagcgatgttgttgtacacgttgaggtgggggaaaagggcatacttctgaaagacggtattcaccggacgttggtgtggcggtgtttgcgtgatgtcttttccggcgatggtgatgacaccttccgaggcggtctggaaaccggctatcaggcgcaacaacgtagtcttgccgcagccggaggggcccaatatcgttacaaattcgcccttacggacagagaggtttacatcattcagtacggctttgtctccgaagtatttcgatacgtgctctacaccgatgatgcagtcagacttttgcataagcgttattaagtgtttaacctaaaactaatagaacgaattctgcctttctaaaaaaagcgggtacaaaggtagggaataaattgggaaaatgaaagtgctgccttcgatttgcattatctttgaagaagataagctgcacctcggcataaaaaatgaacgagttcgttttatactgttctcggtttacattatctttgtagcattaatgaatactattatagtagaaggaggcaaggacatgggtaacagaatatatcctatcgggatacaaaattttgagaagattcgtaaggaaggatacgtttatgtggataaaactgcattgatgtataagttggtgaagagtggcagttactatttcctttcccgcccccgccgttttgggaagagcctgttgatttccacgctcgaagcctattttgaggcgaaacgggacttgtttgaaggcttggcggtggaaactttggaaaaagactgggtgaaacgtcccgtgttccatctggacttgaatatcgggaaatatgatacgccggacagtctggacaaaatactgaatgaaacgcttgattactgggagtcactttatggaacgcgttctgccgaaacgacccttgccttgcgctttgcaggagttgtgggacgggcctatgagcaaagtggtgagcgtgtagccattctcatcgacgaatatgacaaacccttgctccaagctatcggcaacgaggaactgcaacgcgaattccgcaacactctgaaacctttctatggcgtactgaaaaccatggacggctgcatcaagtttgccttgctgacgggagtgaccaagttcggtaaagtcagtgtgttcagtgacctgaacaatctgaatgacatctccatggacgagccgtttatttccatctgtggaattactgaaaaggagatacatcttaattttgaagaagacctgcacgagttggcagccgcgcagaaaatgacgtatcaggaagtgtgcaatgaactgaaagcgtgctatgacggttatcactttacagaaaatacggacggcatctacaatcctttcagtttgctgaatacattctttaagatgaaattcggcaactattggtttgaaaccggaacgcctacttaccttgtggagttgctgagacgcaatcattacaatttggaacgcatggcgcatgaagaaacggatgctgatgtgctgaactgtatttatggcgacaacgaacccataccggttattttccaaagtggttatctcacgataaaggggtatgataaggaattcggtctataccgtctcggtttccctaaccgggaagtggaagagggctttatcagatttctgatgccgttttatacccgcttcaatcagttagaagcaccgtttgagatacaaagatttgttcgtgagatacgttccggccaacctaacgctttctttaagaggctgcaaagcttttttgccgacacaccttatgaattggtgaaagacttggaattacattaccaaaatgtgctgtttatcgtcttcaaactggtgggtttctacacacaggcggagtatcacacttcggaagggagggtggatctggtagtgaagactgccgattacatttacgtcatggaattcaaactggaaggtactgcagaagaagccttgcagcaaatagaagaaaaacagtatgctcttcctttcgaggcagacccgaggaaattatttaaaataggtgtgaacttcagtaataaaacaaggaatatagagaagtggattattgaatgacagatttgtgtagttcgcgttcttttattccgttttgacactatcttatgcggattggagtagagagtccttttatatttcctctttgttgtgtgttaagttaacgtaagttcctaatttctaattctcaaaattagagaaaatggtatcggacaaaacaaaatggaagaattaaaaaataaaaaaagaaaagtcggaaaaaacaacctaaatacttgactttgcctttcggatgtcgtatttttgcagggtagttgataatagagaattcatacgacttattttttaagataataacagacaaaaaacaagaaaggcggtaatttcaatgggaaattatcgccttttttgttgatatttattagattcaggcttaaaagaggctttttacgtttttaataaacgttgagcacattctttaaaaacgttcccgttattctttaaaaacgaataacaagaagcttaataaagcagaaaaacgcctgttatttgtctatatttgagactgtgataagaatgctcagcattctattgatggatcttgcttggtaaattgtttacacagtaggctctgcttgtaacaggccttatcagcccacgttcccggctgcctcgtgcacatctgccacagctcgtccgctcggatcatttttcccttgcaacgtggcatcccaagcgagtgcttcagcagtagagcaagccacgctcggcacactgggcacgcttcgggcagccgactgactggggaagtgttcttcgaaaatgctacgatagtaatattcctccttattctgtggtggattgatgggaaaccgttcggcggcatgttccatctgatggtcggtgacggcggcagaagtaatggctttcaatgtatcaatccaattataaccgacgccatcggagaattgctctttttgccgccaggcaacactctgaggcagcatatcctgaaaagcttcgcgcacaatgcgtttctccacttctttgcccggacacatcttgacggcagggctgaggttcattgccacatccaggaattctttatcgaggaaaggaacacgaccttccacaccccaggcagaaaggctcttattggcacgcagacagtcgtacaggtgcagcttggagagtttacggatcgtttcttcgtggaaagcctgcggtgtgggggctttgtggaagtagagataaccaccgaaaacctcgtcggcaccttcaccactaagcaccattttgatacccatagacttgatgacacgtgccaacaggtacatcggtgtggaagcgcgaacagtggtaacatcgtatgtttcgataaagtagatgacatcacgcaaggcatcgagcccttcctgaatggtataattgatttcatggtgaacggtgccgatgtattccgccacttcacgggctttaatcaagtccggtgcaccgcgcaggccgacggcgaaggagtgaagttgaggccaccaggcttcgctctggttgttggtttcaatgcgcttgcgggcgtatttcttggcaatggcagagatgacggaagagtcgaggccaccactgagcagaacaccgtaaggaacatcggacattaactggcgttgcacggcagcttcaagggcgagttttataagttgacgaggggacgagttgacgaggggacaagaggctacgctgtcatctccccttgtcaacttgttcccttcttcccttgtcaacttttccactccttcccaagtcatccaggggcgttgataccaacgatgcattttcccttcatgtccccagaaataatgtccgggcagaaaaggctcgtaggtatcacagaaaccttcgagagctttcagttcgctaccgacgtagatatgtccctggtcgtcacgaccgatataaagagggattaccccgatagggtcacgggcaatcagataatcgtctgcttcctcatcgtaaagggcaaaggcgaagataccgttcaattcttcgaggaaatgaatgcctttatccttatataatgcgaggatgacttcacagtccgatcctgtacggaaagcatacttgccggcgtagcgggaacggatttcccgatgattatagatctcaccgttgacggcaaggatttgcttgccatccggagagtacaaaggttgtccgccactttccggatcgacgatggaaagacgttcgtgagccaggatggcactgccgcctacataaataccactccagtccggtccgcgatgacggattttctgcgccattcgaagcgctttgtttctcaattcctgggattgagatttgatattgaagatacctacgattccacacatgatgcttagtgattaggggttagttactcaaatacttgtctattctctctgccactctccgtccgtccgccagtgcatgcaccacaaggctggcaccacgtgccgcatcacctgctacgaatacattttccggaaattccggttgttccggtttcaggaagcccatggccagaagcaccatatcggtgtctatcacttccttctttccggtaggtttcatggtagggcgtccgccatcctgagccggaatccattccacttcttccacctctacaccgcagacttttccattcttgccaataaactgattggatgccagcgaccagcggcgcgtgcaaccttcttcgtgacttgaagtcgtcttcagtacaatgggccattgcggccaaggagtagcgtcattgtgacctacgggaggctgtggcatgatttcaatctgtgtcacactcacggctccctggcggatactcgtaccgatacagtctgatcctgtatcaccgccaccgatgacgagaacccgtttgcctttggcatttaccagacggtctttggggaacgtttctccatcgaggatatgattttgctgggacagcatttcgagggcaagataaatacctttcagttcgcgtccggggatattgaggtcgcgtgcctgtggcgtcccggtacagatgcagtaggcatcaaagcccgcggggagtttctgtacatctaccgttacgcccatttcgaacttgataccttcggcttcaagcactcccatccggcggtcgattactgccttatcgagtttaaaattaggaataccatagcgcagtaatccgccgggcatgggtttgctgtcaaaaagagtcacttcatagcctttagcattcagccggcaggcagcggagagtcccgcaggacctgcgccgatgatggcaacccgctttccattacgttcgggctgaatgggcacgatatacccttcgcgaaaagccgcttcggcaatagccgcctcgttttcacgaatggtgacaggctcatcgcacgaaagcttcagtacacacgacttttcgcaaagtgccggacagatgcgtccggtaaattcggggaagtcgtttgtggcagcgagtacttcgtatgcttcgcgccatttacctttataaagtgcatcctgaaattcaggttgcttattgcccaacgggcatgcccagtgacagaagggtacaccgcaatccatgcaacgtgatgcctggagtttacgttcgtgactgtttaaagtttgctccacctgactgaagtcggtgatgcgttcgtggacaggacggtatcccgcttcctgtcgtggtatgtttaagaatgcttttggatctgccatttttagatttataatttatgatttatgtttagatttacgatttcggatttatgatctctgcttaggcttacgctatggcatgcccttacgatacagtccggcaagtcataaaatcataaatctgaaatcataaatctcttaataatctctctgcatctctgcaatcttctgttgcagtttccgcatttgctcttcttgcagtaccttcttgtactcgatggggactatctggataaattcatccacatatcggttccagtcatcaagcatagtgcgtgccaggttggagcctgtatagaggtagtgctgacggatgagttcgtgcaactctttacgataggaggcttcttcgatgaggcttagttccaccatttccatgttacagaaataatcgaagtttccatccttattccatacataagctacaccgcccgacataccggctgcgaagttgcgccctgttgaaccgaggactaccacacgaccgcccgtcatgtactcgcaacaatgatcgcctacaccctctactacggcaatggcaccggaattgcggacagcaaaacgttcgcctacgcgtccattgatgtaaacttcaccactggttgcaccatagagcaaggtgtttcctgcaatcgtattcttctcggcctggaagttagagcgtaccggaggcaatacggcaatccgtccgcccgaaaggcctttgccgaggtaatcgttcgcttcaccttccagcttgaagttgacacccggtacaaggaaggcaccgaaactttgccctgcagaacccttgaactttacgttcaacgtatgttccggcagtcccgcttcaccgtacttcgcggcaatggtgcccgaaagcatggctccgcaagcacgatccgtattggcaatcgtatattccagtgagatttctttctggttttccagagcttcggcagcggcatgcagcatttcaacgtcttttacgtggtcgatgccgtgttgctggtcgatggtgtggcggatggctgcaccattatcgacgcgtgccagtattttgtcgaaactaatcagggattgcttgggtgattcgttttctggcttgcggataataagatccgtgcgtccgatgatgtcatccagacgttccacaccgattttggcgagatactcccgcacttcctgtgccaggaaagtgaagaagttcaccagatattcgctgcgtccgtggaagcgccggcgaagttcctcgttttgcgttgccacacccacggggcaggtgttctgatggcatttgcgcatcatgacgcaacccagtacaatcaaagcgctggttgcaaaaccgaactcttcggcacccagcatcgccatcagtacgatgtcgcgaccggttttcaattgcccgtccacttgcagcatcacttgcccgcgcagaccgttcagtacaagggtctgttgcgtctcgcttagtcccagttcaggagagataccggcatagcggatactggaggcaggagaggcgcccgtaccaccttccgcaccggagatgacgataaggtctgcttttgctttggccactccggcggcaatggttcctacaccgctttcggctaccagtttcacactgatcttggcacgaggatttacattcttcaggtcgaagatcaactgtgccaggtcttcgatggaataaatgtcgtgatggggcgggggagaaatcaatgaaatgccaggaatggaatggcgcgttttcgcaatcacctggtctactttaaagcccggcaactgaccgccttcacccggtttggccccttgtgccactttgatttgtatttcatcggcgttcaccagatactccgttgttactccgaaacgtcccgaagctacctgcttgatggcgctacgcagactggttccgtcttcgcggggcgtaaagcgtgcgctgtcttcgcctccctcacctgtgttgctgcgtccgtgaatccggttcatggcaatggccattgcctcatgcgcttctttgctgatagacccgtaactcatggcacccgtcacaaagcggtgcatgatgctttctaccggttcaaccttatctatagaaatgggggcacggcggaaatccaggaagtcgcgcaggaagataggcgcttcttttctgtctaccagactggtgaattctttgaacttcttatagctgcccaggcgtgtggcaagttgcaaggtagaaatggtttcggggttccaggcatgtttttctccgtctttacggaaagcatacaaaccgttgttggggagtaatccgtctacttgtgcggcaaaacctgcatcgtggaatgcgattgcatcgcgtgccacttcatccagccgaataccgcctattgtggatctcaacccgccgaaataagcattgctgagctcttcactcaaacctacggcttcgaatattttcgctccccgatacgaacgaatggtactgatacccatcttactcatgatcttgaacaatcccttgcagatggatttgatatatttcttttcggcagtggcataatccaactggatttctttcttcgccaccagcttgtcgatcacggcgaatgccatgtaagggttcagggcgctggcgccaaatcccagtaacagggctgcatgcatcacctcgcgtatttcaccgctttccactaccaatgccgtctgcacacgtttacccatggagataagatggtggtgcactgcgcttactgccagtagggaggggatagccgcatgagtggcatccacatcacggtcgctcagtacaatgtagttcaccccttcgctgacggactcttccgcttgcttgcaaagtgctgtgagtgcttcctgcaatccggcacgaccctttgctacttcaaacagcaagggtagtttcaccgttttgaaccctttgtagcggatgttgcagagaatatccagctgtgcattgctcaggatgggatggttgaggcgcaccatcttgcaatggctttcgctgggtgtcaggatgttcatgcccacggcgccgatatattccgtcagtgacattaccagttcctcgcgtatcgggtcgataggcggattggtgacttgtgcaaactgttggcggaagtaattgtacagtagttgcggcttatccgaaagcacggcaagcggcgtatcattccccattgagtggataggctcggcacccgtggtacacatcggaacgatgagccgctccacatcttccttggaatagccgaaggtacgcagcatcctctcgtaattctctacgctatgggggactttgcgcccgcttttcagctcatccagttcgatgcggttcgttgccagccaactgcggtaaggcttggcttcggccaactgttttttcaattctccgtcgtagtagatttcgcctttctcggtatctaccagtagtatcttacccggttgcaggcgtcccttttctttgatgtctcccggttcgaaatccatcacgcccacttcgctggccactaccatcatgtcgttgtgcgtaatcagatagcgtgcaggacgcaatccgttgcggtcgagcataccgcccgcaaaacgtccgtcgctgaacagcaaggcggcagggccatcccagggttccatcaggatggaatggtattcatagaatgctttcagatcttcgctgataggattcttttcattgaaagattccggtactagcatggccatggcatgcggcaggctgaggcctgacataacgaggaattccaaaacattgtccagtgaggcactgtcgctcatccccggctgaatgatggggcgtatctccctgatgtcgcccaagacgggagaggagagcacactttcacgggcttccatccaaccccggttgccgcggatggtgttgatttcgccgttgtgggccaggaggcggaacggttgtgccagtccccaggtagggaaggtgttggtgctgaagcgggagtgcaccagtgctatgccgctggtgaagtaggggtttgtcagatcggggaagtagcctcgcagttgcagtgaagagagcatacctttatagatgatgttcttcgtggatagggagacaacgtagaaatcttcgcgcgtggcaatatcggatttgcatactttgttttctattctttttcttatgagatagagtttacggtcggctgtctcgctttccgtaaatccggtgatgaaaatttgtttgatatccggttcgttggcaagtgccgattctcccagaatttctggacaagtgggcacattgcgcaggtgcatcaatgtcaatccttctttttcaatctcttcgatgataatacttaagatagcaccctggtctttctcatctttcggtagaaagagaagacctgtaccgtattttcctttctcggggacaggaataccctgcaaaagaataaactcgtgcgggatttgcagcaggatgccggcaccgtctccggttttgttatctgcaccttcggcgccccggtgacgcatgttctccaacaccttcaatgcagactctaccagttcgtgtgacttgcctccgtggatgttcactaacataccgacaccacaagcgtcatgctcgttctctacatcatacaagcccaactgcctgggctgtcgttgatatacaggatgttggctttcttcccttccctgttgtccggcttttctctttgtttcgttgttaaaaagttcttctttcatctttttaagtttactttattctgtagtaatacctattattgctatcaaaatgtttggcaaaagtattaatttaatttcaaattggtataataatgtgggtttttgtgacttgcaaaatgtctgtttattggatctgtgttttaaattgaaataaaatatatgcttttgtgttttgaattgaagtaaaatgcgtggtttatattctgtattgtaagtacgcctttccctcgttcgagaaattgccatattgccataatgccaaatagccaaaagggaagtgcatgacatttttttgtttcatccttatccggatattaccaagtccgtaccaactccgtaccaagtctgtttctatagacacggagatggtacggacttgatacagtgttgatataggattgacgtggatttagtctctttacccgttggcagaattgatttctttctttcgggtatgaataatgagtatttctacattaagtaaatagagtatctcaattcccctcctccgtcggaggaggggtgcccagagggcggggtggtaggtaaagcaagaaataccgatgaatcatataaataaggaattcttttctcacctaccacctcccccttcgggtactcctcctccgacagaggaggagaattgagatagtactgtttaatcacttttattcattacttttccattatgaattaattccgccaacaggttctctttatcttattggccgtttcctttggccttggcattttggctttttggcaatttggcaaccttgaaaaatgacactctttatcggattggaagatttttccgctatctcctttcaatataaaactaaaattccattgcttgctttgaatttataaagttattccttttgctttaataagtttgttttctttaactttttgacaagaaaatatcttttttctattcttttgataaataaataggcaaaacattaactttatgttcgtgagattttatatctttgcagcgcaaaatcaaatattaattagtatgtgtggaatagtaggctatattggtcaaaagaaagcctaccccattcttatcaaaggattgaagcgattagagtatcgcggatatgatagtgcaggggtagcattaatcagtgataaccgacagttgaacgtttacaaaacgaaaggtaaggtttcggaactggaaactttcgttactcaaaaagatatttccggtaacatcggaattgcccatacccgttgggctacgcacggggaaccttgctccgctaacgcccatcctcattattcctcttccgaacatctcgctctcatccacaacggcatcatcgaaaactacgccgtccttaaagaaaaactccaggccaaaggctattcattcaaaagcagtacggacaccgaagtactggtgcaactgatagaattcatccagaaatctaaaaatacagatttgctgactgctgtgcaattagcgttgcgtgaagtaatcggtgcttatgccattgccgtgctggataaggacaatccggatgagattattgcagcccgcaagagtagtccgttggtggtaggtatcggtgaagatgagtttttcctggcttcggatgctacgccgattgtggaatatacagataaagtcgtatatttggaagatgaagagatcgccgtcatccgccgcggagagaaactgaaggtggtgaacctgaaaaatgtggaatgtccgcacgaagtgaagacggtggcgctgaatctgggacagttggaaaagggtggttatccgcacttcatgctgaaagagatttttgaacagcccgattgcattcacgactgtatgcgcggacgtatcaatgtagaaagtacaaatgtggtgctttccgcagtgattgataacaaagaccgcctgctggcagccaaacgtttcatcatcgtggcgtgcggtacttcctggcatgcggctcttatcggaaagcatttgatagaaagtctttgccgcattccggtggaagtggagtatgcttcggaattccgttaccgtgatccggtgatagacagtaaggatgtggtgattgcgatttcgcaaagtggcgagacggcggatacactggcagctgtggaactggcgcggagtcgtggggcatttatctatggcatctgtaatgcgattggttcgtctattccgagggctacgcatacgggttcttatatccacgtaggtcccgaaatcggagtggcttccaccaaagcgtttacgggacaggtgacagtgctcaccatgctggcgctgacgcttgccaaggagaagaatacgatagatgaggggcaattccttgccatcgtgcaggagctgaaccgcattcctgataagatgaaagaagtgctgaaactgaatggcagcattgcagagctttccaagatcttcacgtatgcgcataactttatctatctgggacgcggatactcgtatcccgtagccctggaaggtgcgttgaagctgaaagaaatctcttatatccatgccgagggttatccggctgctgaaatgaagcacgggcctatcgcactggtagatgctgaaatgccggtggtagtgattgctacacagaacgggctttatgagaaagtattgagcaatatacaggaaatcaaggcgcgtaagggcaaagtgattgctctggtgacaaaaggggatacggttatcagcaagattgccgatacttgtatcgagttgccggaaacaatcgagtgcctcgacccgttgattactacagtaccgttgcagttactggcgtatcatatcgcagtatgcaaagggatggatgtggatcagccgagaaacttggcgaagagcgtcacagtggaataaagagggtaatacgaaataaatagtaaacggtaaattgtactttgtacattgtaaattgtaaatgaactgatggaagaactgaagcatgaatgtggcgttgccatgatacgcctgctgaaacctctggaatactatgaacagaagtacggcacatggatgtacggtttgaacaaactctatcttctgatggagaagcagcacaaccgcggacaagaaggcgccggtctggcttgtgtaaagctggaagcaaatcccggtgaagagtatatgttccgtgagcgtgcactcggttcgggtgccattaccgagatattcggtacggtgcagagtaactttaaggatttgacaaaagaacagcttcatgatgcggattacgctaagaaatatctcccttttgcgggcgaggcttacatggggcacttgcgttattccactaccggaaagagcggcatttcctatgtgcaccctttcctgaggcgtaataactggcgggctaagaatcttgctctttgcggcaatttcaacatgacgaacgtggatgagatctttgcacgtatcactgctatcggccagcatccacggaagtatgccgatacgtacatcatgctggaacaagtgggacaccgtctcgaccgtgaagtggagcgcctcttcaatcttgccgaagcggaaggattgacaggcatgggtgtgactcactatatagaagatcatatggacctggcaaacgtgctgcgtacttcgagcaaggagtgggacggaggctatgtgatatgcggactgacgggaagcggtgaatcgtttgccgtgcgcgacccgtggggaatccgccccgcattctggtatcaggatgatgaagtggcagtgcttgccagcgaacgccctgtgatacaaaccgctttcaatgtgccggcagccagcattaaggaattgatgcccggacaagccttgctgattaacaagacaggcaagctgcgcaccacccaaatcaataaagtacgcgaggtgaaaccttgttctttcgaacgtatttatttctcacgaggcagtgatgtggatatttacagggaacgtaaactattgggtgagaaactgatacctaatatcttgaaagccatcaataaagaccttgaccataccgtgttttccttcatcccgaatacagcggaagttgcgttctacggcatgttacagggactggatgattatctgaatgaagagaaaatgcaacagatcgcttccctgggacatagccccaatctggaggagctggaacagatactttcccgccgtatccgtagcgaaaaggtagccatcaaggacatcaaactgcgcacgtttattgcagaaggaaacagccgcaatgacttggctgcgcatgtgtatgatatcacttatggcagtctggtgccgggtgtggacaatcttgtcattatcgacgactccattgtacgcggaaccactctgaaacagagtattatcggtattctcgaccgtctgagccccaagaagattgtgattgtttcttcttccccgcaggtacgttatcccgattattacggtatcgacatggcaaagatgagtgaattcattgctttcaaagcggccatcgagttgctgaaagaccgggatatgaaagatgtgattgccgctgcctaccgaaaatcaaaagaccagataggactgccgaaggagcaaatggtgaactatgtgaaggatatctatgcacctttcactgacgaggaaatctccgtcaagatggtggaactgctgacacctgccggaacaaaggcgaaggtggaaattgtataccaaccgttggaggggctgcatgaggcttgtcccaatcatcggggagactggtatttcagcggtgattatcctacgccgggtggggtgaagatgctgaataatgcctttattgactatatagaacaagtatatcaattttaacgaaatagtgtttagtgataagtgattaactaatcacttatcactaaacactaatcactaactaacatgagaaatgtaactcttatcctcgacgacgggagccgcttccacggcaagtcgtttggctacgaaaagccggtagcgggagaggtggttttcaacacagctatgacggggtatcccgagagcttgactgacccctcgtatgccggacagttgatgacgctcacttatccgttggtgggcaattatggtgtgccgcctttcactatcgaaccgaatggactggctacctttatggaaagcgaacgtatccatgcggaagccatcattgtaagtgattatagtgaggactttagccattggaacgctgtggaaagccttgctgattggctgaagcgcgaacaggtgccgggcatcacaggtatcgatacgcgtgagctgacaaaggtgctccgcgaacatggcgtgatgatgggtaagatcgtctttgatgatgaaccggagaatgtgcccgatgctgtgtatgcgggggtgaactatgtggataaggtgagttgcaaggagataatccggtacaacgaaggtgcgggtaagaagaaagtagtcctggtggattgtggagtgaagagcaatattcttcgctgtctgctgaagcgtgatgtggaagtcatccgtgtgccttggaactatgattataatgaactggagtttgacggacttttcattagtaacggcccgggtgatccggatacctgtgatgctgcggtgcagaatattcgccgggcaatgaagaatgaaaaactacctatcttcggtatctgcatgggaaatcagttgctgagcaaggcaggaggagcaaagatatacaagctgaaatatggtcatcgcagtcacaaccagccggtgcgtatggtgggcacggagcgttgcttcatcacttcgcagaatcatggttatgcagtggacaacacgacgctgacggaagattgggaaccgctgttcatcaatatgaacgacgggtctaatgagggcattaagcataaacggaatccctggttctctgcacaattccatccagaagctgccagcgggccgacggatacggagtttttgtttgatgagttcgtgaaactgctgtaatcacctataaacatacaacaaatgaaagaaaacaatataaagaaagtcctgctactcggttccggtgcactgaaaatcggcgaggcaggtgagttcgactactccggcagccaggcactcaaagccttgaaagaagaaggtatctacaccgttcttatcaacccgaatatcgctactgtgcagacttcggaaggcgttgccgatcagatttatttcctgcctgtcactccttattttgtagagaaagtcatcgaaaaagaacgtccggacggcgttatgctcgcctttggtggacaaacggcattgaactgcggtgttgccctctacaaagatggagtttttgagaaatatggtgtaaaagttctcggtactcccgtacaagccattatcgatacggaagaccgtgagattttcgtgcataagctgaatgaaatcgatgtaaagactatcaaaagcgaagccgtagaaaatgccattgatgcccgtcgtgctgctgccgaattggggtatccggtgattgtccgcgctgcatacgcgcttggcggactgggttccggcttctgtgacaatgaagaagaactggatgtgttggttgagaaagctttctccttctccccgcaggtgcttgtggaaaaatctttgcgtggatggaaagaagtggagtatgaggtggtgcgcgaccgctttgacaactgtatcaccgtttgtaacatggagaacttcgacccgctgggtatccatacgggagagtccattgttatcgctccgtctcagacgctcagtaactccgattatcataagctgcgcgaacttgctatccgtatcattcgccatatcggtattgtaggagaatgtaatgtgcagtatgcttatgatcctgaaagtgaagattatagagtgattgaagtaaatgcccgcttgagccgttcttctgctctggcttctaaagctacggggtatccgcttgctttcgttgctgcaaaactcggtcttggctacggattgttcgacctgaagaattctgtaacgaaaaccacaagtgctttctttgaacctgcattggattatgtggtctgcaaaataccccgttgggacttgggtaagttccatggtgtagacaaggaactgggttccagcatgaagtcagtaggcgaggtgatggctatcggccgtacttttgaagaagccattcagaaaggtctgcgtatgataggacaggggatgcatggtttcgtggaaaataaggaacttgttatttctgatatagacaaggcgctccgtgaaccgacggacaagcgtatcttcgttatatccaaagctttccgtgccggatataccgttgatcaggtgcacgaactgacgaagatcgataagtggtttctggagaagctgatgaacatcatgaacaccagcaaagagttggaacagtggagcaagagccacaaacagatagccgatctgcctttggaattgctgaaaaaagccaaggtacaaggtttctccgatttccagatagcccgcgccatcggttatgaaggagacatggaagacggtatcctctatgtgcgcaatcatcgtaagagcgttggcattgtccctgtggtgaagcaaatagacactcttgctgccgaatatcctgcacagactaattacctgtatctgacgtatagtggcatcgctaatgatgttcattatctcggcgaccgtaaatccatcgttgtacttggttccggtgcgtatcgtatcgggtcttccgtagagtttgactggtgcggtgtacaggcactgaataccattcgtaaagaggggtatcgcagcgttatgatcaactataatcccgaaaccgtatctacggactatgatatgtgcgaccgcctctacttcgacgaacttaccttcgaacgggtaatggatatccttgaactggaaaatccgcacggggtgattgtttctaccggtggtcagataccgaataaccttgccctgcgtttggatgcgcagaaggtgcctatactcggtacttccgccaaaagcattgacaatgccgaagaccgtgagaagttctctgccatgctagaccgtatcggtgtagaccagcctcgctggcgcgagcttacgagcatggacgacatcaacgagtttgtggaagaagtaggtttcccggtacttgtgcgtccgtcatacgtgctttcaggtgctgcaatgaacgtttgttccaatcaggaagaactggaacgcttcctgcaacttgcggccaatgtatcaaagaagcatccggtggttgtcagccagttcatcgaacatgccaaggaggtggagatggatgcggtggcacaaaatggagaaattgtggcatacgctatctctgaacatattgagtttgccggagtgcattcgggcgatgctacgattcaatttccgcctcagaagctttatgtggagacggtacgccgcattaagcgtatcagtcgtgagattgcacgcgaactgaatatctccggtccgttcaatatccagtatctggcccgtgagaatgacattaaggtgattgaatgtaacctacgtgcatcccgtagtttcccgttcgtcagcaaggtgctgaagattaatcttatcgaactggctacgaaggtgatgttagggcttccggtagaaaagccgaataagaatctctttgaactggactatgtaggcatcaaggccagccagttctctttcaatcgcttgcaaaaggccgacccggtgttgggtgtggatatggcatctacaggtgaagtaggttgtatcggaagtgatacgtcctgtgccgtactgaaggctatgctttctgtaggctaccgcataccgaagaaaaatatcctgctttctaccggtacaccgaaacagaaggtggaaatgctttccgctgcccgcctgcttcagcaaaaagggtataagctttttgcaacgggaggtaccagtaagttccttacggagaatggggtggagaatacgcaggtgtattggcccagtgagactaaccaacagccgcaagcgttggatatgctgcacaaaaaggagatcgacatggtggtgaatattccgaagaacctcactgcgggtgagttgagtaacggatataagattcgtcgtgccgctatcgacctgaatgttccgctgattacgaatgcccgcctggcaagtgctttcatcaatgctttctgtacgatgacgctggatgatctggcaattaaatcgtgggcggagtataaataatctctgtataacaaagtgagaaaaacatttgttagtcaaagagaatggtttaactttgcatttacaactataaaaatataggagagtatattatggatacaacgatggaaaccatttcatttgagttgccgaaagctgatttaaagttattcaaagaattggcaaagaagatgggctggactattactgacaaaaagtcgggtatagaaaaggctatagaggatgtgaagaccgggcgcgtgcataaagcaaaagatgcagatgagttatttaagcaaatattaggctgatggcatataccttgatatataccggacagtttaagaaagatttaaagcgttgccagaaacgaggattagatattgaacttttgcataaagtgataactcttttacaagaaaacggttctttgccggctgaatataaacctcatatattgtcgggacaattttcaggatattgggagtgtcatataaagccggattggttgttgatatgggagcagaatgataaagaattgactttattgctgcttaatactggaacacattcggacttgttttgataactttagaaatagcgggtctcgttgcattacaaagatgtaacggggcttttgctttttatatgctgcaaaacatatccctatttcttgctgattcagaataaataatctttctttgcaccagcacagttcagcacagttgcctgtgctatccttactttgattaaacctgtatacgcaatatgaaaacaatttaaagtttcccgcgacacggtttttaaagcttttattgatctgaaggagcgggggattatcgactctactcctggtaaaggttactatgtggtgaaccgccagaaaaatatcctgctgctgctcgatgaatattcaccctttaaagatacattgtataacagtatcatccgccgcctttccacgcgttataaggtagacctgtggtttcatcagtataacgaagcattgttcaatgctattcttcgcgattccattggccgctataataaatacgtggtaatgaacttcgataatgaaaagatttctccttatctctataagatagactcttcccgcctgttgctgcttgatttcgggcagtttgacaagcgggagtactcatacatctgccaggacttcggtgaagccttttacgcagctatggctcaattgtcagataggttgcagaactatcgcaagcttatcctgtttctggcacgggaaagtaagcatcccaaggagacgtgcgattatttcaggaagtattgtgcagatcatcaattggaatgtgagataatagagactttggacgacagggaagtgcattccggtgaagcctatattgccatccgtcaggtggatgtggtggagattgtgaagaagagccgtgcggcaggtttgacgtgtggcgttgatttcggcttgatagcctataatgatacgccggcttatgaagtgattgataagggaataacagtgatgagtgttgattggcaaaagatgggaatcctgacggcagatttcatcttgagtggcaaacccatacaggtttgtctgccgacggaagtaaatttaagaggctctttatagcctttttttacaaactgatttcagcacagttcagcatagataatgttttattaaccaaataaatgatagcatgaaaaagtatccgaaaatcgggattcgtcccactatcgacggccgccagggtggcgtacgtgaaagccttgaagaaaagacaatgaacctggctaaagcagtagccgagttgatcaccagtaacttgaagaatggtgacggaagtccggtggagtgtgtgatttcagacagtaccatcggtcgagtagccgaaagcgcggcttgtgccgagaagtttgaacgcgaaggcgtgggttctactattacagtgacctcttgctggtgttacggtgccgagactatggacatgaatccgtattatccgaaagctgtttggggatttaacggtacggaacgtccgggagctgtatatctggcagctgtactggcaggacatgcacaaaaaggattacctgcttttggcatttatggacgtgatgtgcaggatctggatgacaattccatccctgccgacgttgcagaaaaactgcttcgttttgcacgtgccgcacaggcagtagcaaccatgcgcggaaaatcttacctgtcgatgggtagcgtatccatgggtattgccggttctattgtgaacccggatttcttccaggaatatctgggcatccgttgcgaatctgtagacctgaccgaaattatccgtcgcatgactgaaggtatctatgataaggaagagtttgccaaggccatggcatggacagagaaatattgcaagaaaaatgagggcaaggatttcaatatccccgcaaagaccaagacccgtgagcaaaaagacgaagattgggagtttattgtgaagatgacccttatcatgcgcgaccttatacagggtaatccgaaacttcgcgaaatgggattcaaggaagaagcacttggacacaatgccattgccgccggtttccagggacaacgccagtggacggatttttatccgaatggtgactactccgaagctctgctgaatacttcttttgactggaacggcatccgtgaagcatacgtagtagctactgaaaatgatgcctgcaacggtgtagccatgctcttcggccatttgctgacaaaccgtgcacagatattctctgacgtgcgtacatattggagtcctgaagctgtgaaacgtgttacgggtaaagaattgaccggtttggcagctaatggtattatccatctgattaactccggtgctaccactctggacggtacaggccagcaaacaaatgcacagggtgaacctgtcatgaaacctcattgggaaatctccgaggctgaaatggagaaatgtcttgaagctaccacctggtatcccgctaaccgtgattatttccgtggcggtggtttctcttccaacttcctgtcaaagggtggaatgcctgtaactatgacccgtttgaatctggtaaaaggccttggccctgtgcttcagattgctgagggatggacggtagagattgatccggaagttcacaaattgctggatgaacgtacggaccgtacttggcctactacttggtttgtgccccgtctttgcgataaaccggcatttgaagatgtgtactcggtaatgaataactggggagccaatcatggtgctatcagttacggacatatcggtcaggatttgattacgctggcttccatgcttcgtattcctgtttgcatgcacaatgtggatgagaagaagatattccgtcctgctgcctggaatgcattcggtatggataaagaaggagctgattacagagcttgcacaacgtacggacctatctataaataacaaatagaaatagacatgataacaaacgaacacatagaacaattcattgcccaggcgcatcgggtaggagatgccggattgacaatatgcagtagcggcaatatctcctggcgcattggtgacgaagtcctgctttccggaacaggctcatgggtaccttctttgcctaaagaaaaagtagctgtctgccgcctttctacaggagaagtattgaatggagtgaaaccctctatggaaagcggtttccatctgggagtactccgtgagcgtcctgatgtgaatgtagtcctgcatttccagtcacactatgccactgctgtggcgtgtatgaagaatcgtcctacgaacttcaacgtaacagcagagattccctgccatgtgggaagtgagattccggtagttccttactatcgtccgggatcgaaagaattggcccagggagtgattgatgctctgaaagatcataattccgtcctcttgctgaaacatgggcaggtggtgtgtggtaaggacttcgaccaggcttttgagcgcgctatgttctttgaaatggcatgccgcatcatgatccagtccggaagagactacactgtacttactcctgaagaaatcgatgatcttgaaacatacattttaggaaagaagactaaatgatgaatacctatctggcagtagattttggaggtggaagcggtcgcattatggccggttccatctgccagggtacgctgaaactggaagaggtgtatcgctttccaaaccgccaggtgcggatgggaaaccatgtgtactgggattttcttgctctgtttgatgagatgaagaacggactccggcaagcggtgcgcaagggatatcatatcaggagcattggcattgatacctggggcgtggactttggattgatagaccgtaacggtaatttgctgggaaatcctgtgtgttatcgtgatccccgaacggatggtttgccggaagagtttttcggtgacaaccttgttcggcattattccgaagccggcatacaagtgatgtccatcaatacactttttcagctttacagcatgaagaaaagtggtgatacgcaattggaagttgcagaccgtcttctgtttatgcccgatcttttcagttacttcctcacaggggtggcaaataatgaatactgcattgcatccacttccgaactgcttgatgcacgtagccggacttggaatcagccactcatccatcgcttgggagtaccagcacatctcttcggagacattgtgatgcccggtacggtacgtggcaaactgaaacgggagattgccgaagaaattggtctgacggatgaagtggatgtcatagctgtcggttcgcacgatacggcaagcgctgtttatgcgattccttcgacacaggtggataaatcccgttgtgctttcctcagttccggtacgtggtctctgctgggtgttgaactggatgagcctatcctcacggaagaagcttgccgcgctggttttaccaatgagggcggggtaggcggtaagattcgttttcttcagaatatcaccgggctttggatcttgcaacgtcttatggcacaatggaaagaaagaggagagcgatgtgaatacgatttcttgctttctgccgccgaatctgcggatattccatccgtcattgacgtagatgataagatattccagaaccctgtggatatggaagatgccattgcggagtattgcgaagcgcacgggcatcctataccggaaacttatggtgaggtagtgcgttgtgtactccaatcactcgccctgcgctataagcaaggaatagaccaactgaaccgtctgcttcccgctccgatagaacagcttaatatcatcggtggcggatgccgtaattcactgctgaaccgcctgacagctgaagctttgggtattcccgtctatgccggacctgtagaggcaaccgctatcggtaatatcctggtgcaagccattgccaaaggagagatcggcagccgtgaagaaatcaaagaatttatttaataacttagccggaacgcagataaacactgctttgcgtagataattatcgtatcgctttttaatctgctaaaatctgtgtttatttgcgtttcaatattgatttactatggacacatcaatcaaacgttatcccgccaaagagcatcatcagccggtggagcgtatctgccggacactggaactccgtgatgatccgcagttgataaccgaataccgccgccggcacagccaagaggctatctggcccgaaatacctgccggtatccgtgaagccggtattctggaaatggaaatatatcttttggacacccgcctgtttatgatagtcgaagtgcctgtagggtttgactgggatgcagctatggagcgcctcgcttccttgccccgacaacaggaatgggaagactatatggccatcttccagcttgtgaaacccggttccactgccgccgagaaatggcaaccgatggaacgtattttccacctttatgactaatcccagccaaagaaataactaccatgaagaacaacactaagaaaaacagcattatcagtaaagacggagtaagctacctcattccgttcattcttatcaccagttgctttgccttgtggggttttgccaacgatatcacgaacccgatggtgaaagccttttccaagattttccgtatgagtgttaccgacggggcactggtgcaggtggctttctatggcggatattttgccatggcattccccgcagctatttttatccgtcgcttttcatataaagctggggtactgctgggactgggattgtatgctatcggtgcattcctgttctatcccgccatgctgacgggcaattactatcccttccttatagcctactttatactgacatgcggactctcgttcttggaaaccagttgtaatccctatatcctttctatgggtgatgaagctacatccacccgccgcctgaaccttgcacagtctttcaatccgatgggctcgttattaggtatgtacgtggcgatgaactttatccagaatcgcctgaacccgatggatacggtggaacgcagccagctttcggatacagaatttgctgcggtacgtgattcggacctgatggtactgattgcgccttatctgattatcgggcttgtcattctggctatgctgattgtgatccgtatggtgaagatgccgaagaatggagatcagtctcataacatcaacttcctgcctacattgaaacgtatattcggtatacaccattaccgcgaaggagtgatcgcacagttcttctatgtaggtgcgcagattatgtgctggacatttatcattcaatatggtacgcgctatttcatgtcggaagggatggaagagaaagctgcggaagtgctctcacagcagtataacattgtggctatgattattttctgtgccagtcgtttcatctgtacgtttatcctgcggtatctcagtccgggactgttgctgaaagtactggctattgtggcttgcgtgtttacggccggggtgattagtttccagaatatctggggaatgtactgccttgtaggagtatcagcctgtatgtctctgatgttccccacgatttacggtatagcattgcagggattgggtgatgatgccaagttcggtgctgccggattgattatggcaatcctcggaggttcgatattaccgccggttcaggcaagcattatagactgcggtacattgatgggcatgcctgctgtgaacctgtcattcctccttccgttcatctgttttgtggtgattgtgatttatggacaccgctcctattgcagggagaaaatgcgaaagtaattatagatacttctgaatttaatagtagagaaccttttatagaaaaaaaaggttctcttttctatttatatagttgtagttcttctttttttgctacttttgtattgcaaaataaaacaagcaaaatatttcgcataacataaaattcttctggtacagatgaaaaaatatcttctacttctgtttttctacctcttgtctgtaaatttggcttttgcacaaaaagatgcgatagatggtaaaagttatatcctttgtataaactcatatacggaagcgtctccctggagtagccggctcatttccaacgttacggaattcgttcaaaaagaccctgagattactctctacgtggagcatctgaatatgctgctggttgaaaatgattccattctggaggaatccaaacgcaatatattcgataaatataaagggcgttctccgcgcatgttgctattattgggaaattcggcgttgttgttgcgggatgaatatagaaaagtttggggagacattcctattgtgctttgtgcacaggaagattatttggattcttatgaagcttatatccacaggcaactttctacgccggaagagcgaactccactttcttatttggctgatccctataatttggtatatctgtatgccgatttgtttattacggaaaacattcgtctgatgaagcagatgatacccggtatggaaaagtttatatatataggcgatggacgtaaagttaatcaggataattccatacttatccagaaagagctgaaaaagaactatccggatatcaagtatcaattttggtctgctgaagatataacaaccaaccagttgttggattccctgtatttcgtagactctaaaacgacgggagttctgttcgcttcatggttctacaagtacacattcggtggtaatagcatgttagctactaattcccataagcttatagctgctacttccgttcctatcttttctcttagcatggtaaatataaccagtggaaaagagggtatgttaggtggatatacctacaaccaggcgaattatgacgagagattgattcaaaccatctcggaggtattggaaggcaagcaggcgcgccatattccgtgctatatacccacagatggagcacctgtcattaattatgagatactgacacgcgatggcctttttcctgccgcatgtcctgccaatacccgctttctgaataaaccacctacattttgggaacattatcggtacttcattttgggaactctcttttctattctgtttcttaccctgcttttcctctatcgtattcgcaatctgaatgaattaaagaaagcacagcagaatgagatagacgcaatggctacctataagatgctggtgaacaacatgcctttgctctatatgcaggaagaactggtgactgataagaatggcaatcccatcgaactgatttaccggaatgtaaattctgaatttgagaaacagttttatcgcaaagaagaggtcataggcagaaaagggagtgaaatatttcctgaatccatgcccgaattcctgcacttcactaagatggcgctgaccgagaaaagagccattacattcccttactattttaaagccatcgatactttctacgatgtggtattgaaaggaacccgccagggaaatatgattgatgtcttctgtctggacagcacggaactgcacaaagcacagcaaaagctgagtgctaccaacagtaagctggcgatggctcttgatattgccaacattgtgccctggaagtgggacctgaagagtaaaacgattctatgtgatatcaacagaccgattgaactgagcactgacgaacaggaagtggaagattcacaactatctgtgcccgattcccagtatttctctaaaatcttcaaggaagaccgtgaacgggtgaaacaggcttaccgggacttgatagaaggacgggtggaaaaagtgaaagaagaataccgcatcatcgacgtacagaaaaacaatctgcgcaaggtggaatgggtagaggcgcaggcagctgtagattcccgcgatgaaggtggaaatcccttgactttggtgggttcgtctcttgtcatcaccaaccggaagaagatggagcaggaacttactacagccaaagaccttgccgaagaatccaatcgcttgaagtcggccttcctggccaatatgagccatgaaatccgtactccattgaatgctattgtcggtttctcggggatattggcatctaccgaagaagaacaggaaaagcaggaatatgtcagcatcatcgagaacaataatactctgctgctgcaactcatcagtgatatccttgatttgtcgaagattgaggcgggaacgttggagttgaattactctaatatagaactgaatgaactgatgagggaactggagcgcggtttcttgttgagagtgaagacggacgcagtgaaactggaatttgtggagcctgccgagccatgtatggttcatacggaaaagaaccgtttgtcgcagctgatgataaaccttgtgacgaacgccattaagtttaccgaaaaaggaagcatccgttttagctatgagatgcgggagaatgaattatatttctatgtaaccgataccggatgtggaatccccaaagataagcagcaaaacattttcgggcgtttcgtcaagctgaactcttttgcccagggaaccggactgggactttctatctgccaaacactgatggagcgtatgggtggcagaatcggtgtagagtcggaagaggggaaaggttcgactttctggtttacgcttccctacaaaccggcagtgaaagaggataaaaaacagacgcccaagaacattcaacctgtttcggtagagaggaataaacttaccatactggttgcggaagataatgcaagcaattataagctttttgaatccattctgaaatacgattatcacttgcttcatgcttgggatggcatggaggctgtagagatgttcaaggagtataatcctcagattgtattgatggatatcaatatgcctgtaatggacggatacgaggctacccgggaaatccgcaagttctccgcaaagattcctatcattgccgttacggcctttgcctatgcttcggatgaacagaaggtgatggaaagcggattcgacggatatatgcccaagcctatcaatgctaagttgctgaaggcgcaactgatggatatcatgcagaagcggatcatcttgttataagatgaaagtttctcattttcagttgaatgttttacaatgctgtgtttcagcccttgcgatgccacacttcgtgggtgctgatgccacacttggacgaacgtgaagtgtggagtttgccctgtttaggtgtggcatttgccccgctcaggtgtggcgtttcttttgatattctgccggtgtcatccccgtcatccgtttaaagaatttgctgaagaatgacggattgggaaatcccagttcatccgagatttggaataccaacaagtcactgtgtttcagcagcacttttgcttcaagaataatggcttggttgatccactgcattaccgtctgcccgcttacttcacgaataaccgtactcagataatgaggagtcaggcacagtttgtctgcatagaaactgatgttacgttcacgtttactgtgttcattaaccaacccgatgaagcggcggaatacttcttcctggcgtgagagctgcaatggggcggactcttcattctttgcatgtatataccttatattatagagtaatgctataatcaagtgttgtaccacttctcggcggaatggaactttgtgtacggtatcccataacattgaaaagaaagcatcgatttgttgcaattcttcctctgtgggcgaaataaaaatgccatgctttgtgtacgaatccgtcagtgcgcttccctgtgcgatgggcaaaaagttattatcgggaacaatgacctgaaagtcataatcctcactgatttccacaatttctatcagtgagttgaaaggactgataataatcattggttcctttaccttatattctatcagattgatggaaatccgtgcttctcctttcagtatccggatgatccggctttctctggtacggtagggcttccctgtgctaaagaggatgctatccatctgggcaaagctgacgacaattccgatatcgcggttgataaagcggaaactgttattgtttacgatgttctcattactcagcagctcgccaagtccaagctccataggtttgctcttttccatatccttttcctcctttaacttatctatatctgtggcaaagataagaaaatagcgggttttcctgtcttttaatactggtgatcgaacaaatggaacatcattacacacaaatagaatgtatacatatacttttaagctctatctttgcgtcctataaagaaataaacaagaaatgtatatggaaatgaaacgaactattctctctttttcctttattcttgcggcaatgctggcacatgcgcaacttacgctggagggatgccaacactcggcacagaccaattatccgctggtgcggcaatacggtctgatagagaaagcccgggaatataatcttgaaaatgccggaaaaggttatctgccgcagttcaccctttcaggaaaggcaacctatcaaagtgatgttacaaaactgccggtggacattccgggaatcgatatgaagagtatgcccaaagatcagtatcaggtgatgttggaagtgtcgcagaacatctgggacggtggagatatccgttccaaaaagcaactgacccgggctacctcggagatagatcgcgggaagcaggaagtggatatgtatgcactgaatgaccgtgtgaatcagctatacttcggcatcctgttgctggacgaacagttaaggcagaatcagcttttgcaggaagatttgggacgcactcatcagcaagtgtccaactatatggcaaacggcattgccaatcagagcgatctggatgccgtaagcgtggagatattgaacacgaagcagaaacgcattgagctggaatcttcgcggcaggcctatctgagtatgctctctatctttataggaaaggaaatcgcttccggaaccacattggagaagcccgccgatacttttgaatccgcttcattggtgaacaaccgtccggaacttcgctggttcgatgcccaaggcggacaattgaacgttcaggagtcttcattgaagacgcgcttccgtccccgcttcgggctgttcgtgcagggagcttacggaaatccgggactgaatatgctgaaagatgatttctccgcattctatgtagcgggagtccgtatgtcgtggaacttcggtagtctctacacgttgcgcaatgatcggaggctgatagataacaaccgccgtaagttggagaccagccgcgatgtgttcctgttcaataccaacctgcaatctacccaacaaagctcggccatccagtccatgcgccgacagatggtagatgatgatgagattatccgtttacgtgtcaatatccgtaaggccgccgaggctaaagtggagaacggtacgctgaccgtaaccgatatgcttcgtgaaatcacagctgagaacctggcacgccaaaccaaggctttgcatgaggtacagttactgatgaacatctggaatctgaaatatacattgaataattaaaggcataaaaatatatatcattatgaaatcaaggaatttactgggactttgttccctattggccctcttttccgcttgtggaaacggtgccccgaaatatgatgtaacaggaacgtttgagactacggaagtgcttgtatctgccgaagcttcgggccgcctgctttatttcgatatcgaagaaggaatgttgttgaaggccggtgaagaagtcggcgtagtggataccgtacagctctacctgaagaagctgcaactggaggcgagcattaaatccgtcgaagaacagcgtcctgatatcctgaaacaggtagcagctaccaaagaacaaatatctgccgcccaacgcgaacggaaccgtgtggcaaacttactaaaagtaggtgcggcaaatcagaaacaactggatgatgcggaagaccagcttgaagtgctccgcaagcaacttgttgcgcagaactctaccttgtccaacagtcaccagagcctgacgtggcaaagttcatccgtcggtattcaggtggcacaggtggaagaccaattgaagaagtgtcacatcgcctctccgataaccggcactgtactggcaaagtacgccgaagcgggagaactcacagctatgggcactccgcttttcaaagtggccgatacggagcagatgtaccttcgtgcttacatcacctccgaacaactgtcgcaggtaaagctgggacagaaagtaaccgtcttctccgattacggcaccgatgagcacaagcagtatccgggcgtagtaacctggatttcggatacctcggaatttaccccgaagactatccttactaagaatgaacgtgccaacctggtgtatgccgtgaagattgccgtgcacaatgacgggctgttgaagataggcatgtacgggggagtggagtttagtgattaacggttagtgattagtgattaatttatggaacatgcggttgttgtagataacgttaccaagaaatatggggcggtggaggcattgaagggtgtttccttgacggttccttccggagagttgttcggcattatcgggcctgacggggcggggaagacttctcttttccgtatcctcaccaccttgctgcttcccgatagtggaaatgcttcggtgtgcggtctggatatagcgaaggattataaagaaatccgtcgtcgcgtaggctatatgccgggacgcttctccctctatcaagacttgacggtagaagaaaacctgaacttctttgctactgttttccataccaccattgaggagaattatgaattggtgaaggatatctaccagcagatagagcctttccgcaaacgccgtgccggagctttgtccggaggtatgaagcagaaactggcgttgagttgtgcgcttatccataaaccggatgtgcttttcctcgacgagccgacaacaggtgtagaccctgtttcccgcaaggagttttgggggatgcttcgccggttgaaggaacagggcatcaccatcatagcctctacgcctattattgatgaggcacgccaatgtgatcgcattgcctttatcaatgaggggcagatacatgggatagatactccggaacgtattctgaaccagtttgcaagtattctttgtccgccgggactggaacatggcaaggtcgaacagaaagatgagtatgtcatcgaagtggataagctcaccaaacgtttcggcaatttcacggcagtggatcatatctctttcaaagtccatcgtggcgagatattcggcttcctgggtgccaacggtgccggaaagactacggcaatgcgcatgcttaccggattgagccatcccacaggaggcacggctcgcgtagccggtttcgatgtcgctactcggacggaggatgtgaaaaagaatatcggctatatgagccagaagttttctctttacgaagacctgaaagtgtgggagaatatccggctgtttgccgggatttacggcatggcagaagatgaaatagcccgcaagaccgatgaacttctggaacgtatcggactgagtgccgagcgtgatacgctggtaaaaagtctgccgctgggctggaaacagaaacttgctttctccgtttccatctttcacgaaccgaagatcgtctttctggatgagccgacgggtggggtagatcctgctacccgtcgccagttctgggagcttatttatcaggctgccgaccgggggatcactgtctttgtcaccacccacttcatggatgaggccgagtattgcgaccgtatctctatcatggtggatggcgtgatccgtgctctcgatacgcccgatgaactgaaacggcaatttaaggttgctacgatggatgatgtttttcagcagttggcacgggaggcggtgcgtacggcggattagccgattcataatataattagtaagaacaatgaaacaatttatagcttttgtccgaaaggaattcttccatatcttccgcgacaggcgaaccatgctgatattgctgggtatgcctgtggtgcagattatccttttcggctttgccataaccacggaagtgaagaatgtccgtgtcgccattctcgacccgtcgaacgatgttgtcacccgacgcattatcgaccgcttggatgcgagtgaatatttctccgtcaccacgaatctgaatactccggacgaggttgagaagtctttcagacggggagatattgatctggcagtcatcttcagcgagcaatttgcgaatcacgtttataccggagatgcttgtgtacagttggtggccgacgctaccgaccccaatacggcaaccacacagaccggttatgccgccaatatcatatcctctgccggacgcgaaatgcttccggcgggaatgcaggtttccactattgttcccgaagtgaagctgctttataatccgcagatgaagagtgcctacaactttgtgccgggtgtgatgggactgatcctaatgttgatttgtgccatgatgacttccatatccattgttcgggagaaggagacgggaacgatggagatactgttggtttctccggtgaagccgctattcattattcttgccaaggcagttccttactttgtgctttcgtttgtcaacttgacaacgattttgctgctctcggtccatgtgctcgatgttcccgtggcgggtagcttgttctggctgattgtggtatcgctgctctttattttcgtttccctggctctgggtttgctgatatcctcggtgacgcggacgcaggttgctgccatgcttgcatcgggattgatactgatgatgcctaccatgctgctctccggtatgatattccccatagagagcatgcccttgctgctccaaggcatttcggccgtacttcctgcccgctggtacattcaggctgtgcggaagctgatgatcgaaggagtggacatttcactggtattgacggaagtcagtattcttgctgtaatggcggttgcgttgattacggttagtttcaagaagtttaagaacctattagaataggagagtggtggtatgataaagtttctgatagaaaaagaattcaagcagttgctccgtaactcgttcctgccgaagatgattcttatcttcccttgcatgattatgatactgatgccctgggcggcaaatctggagataaagaacattaacctgaacattgtggataatgaccacagcgtcctttcgcgccgccttgtggataagatcggtgcatccacctatttccgtacaacggcccttcctgatacttacaatgaaggattgcgctccatcgaaatcggttcggcagatattatcctggagattccccgcgatttcgagaagaattgggtgacgggcaacagcccccgcctgctggttgccgtcaatgcggtgaacggtacaaagggaggattgggcggctcgtacctgtcttccatcattaatgactatacccgtgagttgcaatcggaatcaccggcaaaggcaatgtctgccgggatgggattgccccggattggcatttcaacgcagaatctgtataacccgaacctgaactacaagctctttatggttccggcattgatggtgatgttgttgacaatgatttgcggttttctcccggcgctcaatgtagtaggcgagaaagaggtgggcactatcgagcagatcaatgtaacgcctgtctccaaactgacgtttattcttgccaaactgataccttattggctgataggtttcattgtgcttacgatatgtttctttctggcatggctgctctatggcattcttcctgtggggcattttgtgacgatatatctttttgcagtggtcttcctgtttgtagtctccggattcggtctggtgatttccaatcattccgctacgttgcagcaggccatgttcgtcatgtggttctttatgctgatactgatgttgatgagcggtttgttcactcccgtacacagtatgccggagtgggcacaactgattgctgcgctcaatccgctgaaatactttgtagaggtgatgcgtaccatttacctgcggggtggtggcattgtggagttacttccacagttgggagcattgacgacctttgcggtgttctttaatttgtgggcagtgaggagttatagaaagagtagttgagattactctttcataatccttttgatttccgcatccagcgaagctttctccgggatattgagtttcggccttaaccgataacgtatcctggtgacgctggcggaggctatacctaatatccgggctatttcttcggtgctttgattgagtaggatgagcatacacagcaactcttcgttcttggtaatattgggacacacatcgcgcaggcggataagtgctgtagaataaatgccggagaaggcgacacggaactctgcttcttctttaggcgtcagcatagtgggagacagagtttccataagcttgttgagttcgctaccggattggtttgaggtttgtatttcagccagttgccgaagcagttcctggttgtgttcatgaagttcatggcgcgactcaagaattcttttcaattccttttcctttttatccaggcggatggaggtgatttcgagctccttttcatccagttgatgatgtaatttcagagatcggtgtctgttccagaaccaggtggccaggagcaggataaagaggatgaatgcaattgtgccgatggtatacgtgcggataacactgttgcgcaaggctatgcctgctgtgagcagactattttcctgttccaccttctccgtctcgtaacgtatatgcgaggctatggattcgcgaatggatttcccatgaattacagagtcgataatcatattatagcgggggagcagctcttttgcagctttcatcctgtcggtacggtggtagctgtcgagcagtaaccggttgttgtggttttcggtttccatatctccgcgggctttggacaagctgacggctttttcaagcaacgggatggcttcttggtatttttcggccttgtacatggcatttccgtagcccatgtaataatccagcagcatatagccgggcactttatcttttatttcttcatagtgcgtcaggactttcggtagggagtccggaaactgagctttggcatccagtttttccatctttacacgtatttgtccgcgcggattggtggctctgatgtagaagctgtcggcaaggttgagcgcgaggaaggctgagtcgatgaggcccattcttttataaatcagggctcttctttcgtacaggcttgccgccataccccaggtctcgttatcttcacgaaacaggcggagtccttcattgttgtaatgcaaggctctgtcgaagaagtttagttcggtgtaattgccgcacagattgattgcggcgagcattgcgccacgtggattctgcgatttattgctttgttccatgacttcctgacagaggctgatgcctttctggaactcattcttccgaatgtagatgtttgccagattggccatggcctgcggatagagtccggtgtcgtcgtatgctccgtttctcatagcttcggcggctcgcagcagggtgggttctgcgcgtgtttcggtggaatcgacggccatataggtgattccggcggctatggtgcaaaagagttcactggaaggatcatcattttcatttatgctcatggcttggtcgaggagttggcaggcttcggcacggcggccgagggtttgcaacatttgtgcgtcgcataccaaaatttcgcgttggcaatgattggatagtatcgggtggttcatttccttgagccgaaggaagtgttcgtgtccttcggctattcttcgggaatgattgtatgcgaacattaagtgcttgattgcataggacatcagacggcgggcgtcgtcaggagatagtccgttggggtgttggtcgcttttgacgggtagcaggaaggcggagtcgagtagggaaatagcgctgtcatattctttgtccaggaggctgtaatttaaactgtgtcagcaaagcaaacaaaaaaagtattaactttgctaacacagtttttttatgagtgaagaatttgattttgaaaggatcaagaacaaggcaatcgagcagctcaaggctggcaagcccttgttgggtaaggacggagcttttgccccgttattggagagcattttaaatgcagccttagaaggtgagatggatgcccatctttccgaggatgaacgcatgagtggcaaccgtcgtaatggcaagatgcagaagcaggtgcaaacttctatgggtgaggtgaccgtttctacaccccgtgatcgtaattccagcttcgatcctcagtttataaagaagcgggagaccattcttgcggaaggtgttgctgaccgcataatcggcctttatgcccttggtaatagtacacgtgaaataagcgactggatggaagagaatcttggtaaccgtgtgtctgccgaaacaatcagttccatcactgaccgggtacttccggaaataaaagcgtggcgttcgcgtagcctggactatatttatccgatagtttggatggatgccattcattataaagtcatggatgagagaggctgtgccattacccgtgcaatctacaacgtattggctatagataaggacggtcgtaaggatttgcttgggatgtacatctctaagaatgagggggcaaacttctggttgaatgtgctgaccgatttacagaaccgtggtgtacacgacattctcatagcttgtgtcgatggtctgaagggcttcccggatgccatccaaagcgtattccctgataccatagtgcaactttgtatcgtccatcagatacgtaactccatcaaatatgtcggcagtaaacaccagaaggagtttcttaaagatctgaaacgggtttacggtgcagtcagcaaggatgccgctgaaacggagcttcttgatttagatcagaaatggggagagaaatatcctatcgtcatcaagtcgtggcaggacaactgggaaaagctcactgaatacttccagttcacatccgatatacgtcgtatgatttatacgacgaataccgttgaaggctaccaccggcaaatacggaaagttacaaaaaacaagggcgtgttccctaatgacaccgcccttgagaagcttgtctacctcgcttatcgcaacatacgcaagaaatggactatgccactggctaattggggcacaattgcccaacaactggcgataaagtttggagatagatttaagttgttgtaattttacgctcgtcgggagtgctggtgcacccccttggcgctggccgatccccgaccgatgagcttgaaagaaaaacagcgcatgacacagtttactttacgcccccttgtccagccggaactgattggcttttgccagtatggcaatactgtctgcatgaaattgtgcaggtggatgggcgctgcctggcggcttgttgcagcttactatgccggatacgagaatgattagcgggaatataaaatacttattcattttgtttagggtacttgtataggtctcaaatataagtaaaatgggcgggttaataaaacgataatttgaaaatgttagaaaactgataataagggagtttattaccgggagttatcgtattcttttctaactcccggtaatttgatgaatttcctgttatttgggacaggagagctttgggttaatgtgcactttcatcatcaatagtgggtgtccaggcgggattgcctccaatccattgggattgttcaccaacactttcgttgcaggaataaacagtagctgtaccgtgaggtcttcctatcaaatatccaagtctcacagtttccccagaggtaacattaaaatctgttgttaaattccggttgagatgatagtttgcccattcggtataccctacaattcctccaacatccacaggagagatactatgtccggttatggagccttgattacagcatcccaaaacctttccggcgatatatccgccaattccgcctactgatacggcataaattgtatttgaacgttctgggttagaaagtataatggaagaagtatttatacaatgcttatattcactttggagtaatccgtctcgtcctattatacctccaatccaaagtgagtttcctttacaacttacatcactttttcctattgaagagcagttgttcatatgggctcctgaatgtccaattatgccgcctatgcataaatagccataggcgaggtttccgtctgatattttcatttctcctgacattgtacaattgtgaactgttattttcgtcgtgggtccatttccaatgacaccacctacaccaaaaggtgaaatgatcgttccttctgggtatgcaaaagaccatgtaacattagccgctatatggatattttctatcaacatactacttgtagttgtcaagtaaccaaagaagccgaagttttctaaatcatcagaaaaacttccttttaattcgccgcttatggtgtgtccgccaccatcaaagttaccactaaaaggcttggcatatgaaatccctattggcatccatgtatcagctgtgacttttatatccgtagttaatttaaagaacttatccaggtaggcttctcccgcttttacttgttcaatcaaatatttcaagtgtccggcactctctatcaggtaaggggtatctttcgtactacctttattatcactctgatcccaagcttcgctcattacatcattatcgaatatatcagcagttccatagccatctgctgctccatttataaaagtaagctccgaattataaaccttgcctgcctcataaggaaaatctccattaaaagaaaccgtataactataaaccatcccgtcgtcgcctgtcacggcaagagccagtttctctttcaatgtggatggaagaatggccatgtaagcagtgaagtttttgctactggcaccggatatagccgcagtaagttgtttggcagtagtgacgttgctttcatcgcttgctttctgggagatggctataccggcatcatcctgtgtgcttagagtgatgtatttaggaacaatgccatcaggaagagttacctcaaacttcagaacagctattttatgcttaaagcttatttccgaaatctccgtaccggaagcagtagtctgtgcagtcataaagttgtaaccggacagatgagcaaaaggagcgtttgcatcgataacctgccctataacattaaagtggcaatcctcccatcttttctcagcttttgatgtaggaaagaaagcatactgggcatcctcaaccgcattccctgtgaaagtagcaatcttgccatcgccatcagtaggtcctgtcgtggtaaagacctcagtcgttgtgccataaagtttaaaggcatcgtttgccgtccactttagtatcaggccgtcagcgccatcatcttcatggcttatacgggtgatagctccgccttgtgtgacggtaatggatattttttcttttcccccgacagaagtatcctcttttataacttcatcctgagtacatcccattaatatcaacaggaatactgcaaagaaaggtatcacattatttattttcatagttttatttttcaaaggttagtatatcgtttattaaatcttccaattcacttatgctacttgaactataacgttgcgtagatcttcgggaactgcttcgaccaggcataccagggttaccaccgggcatattgctcaatgccattacaccctcactttccatttctatgatctctatttgcggagtcacatactttgcttttctctcttctttcatatttccttttttaaagttgatagtcatcttgtattttgatagcaaaactaacgattccactattagagaagccaaattaggactgtacaattcaatgtacaattgcgtggtttattccacattttatcctacttttgcatccaaattaattatatctgatatcctaatgaacacgcagacaacttatctcgcctctaagccgcattatgaaatcctggatggattacgtggagtggcagctgttatggtcgtagccttccatcttcttgaagcacattcgggtggcaaccatctcgcacaaatcattaaccacggctatcttgccgtcgacttcttctttatgctttcgggctttgtaatcggttatgcctatgatgaccgttggaaccggatgagtatcggcactttcttcaaacgtcgtgtcatccgcctgcatcctatggtaattatgggtagcattatcggtgcccttttctttttcctacagaaatccccctgctttccgaatatggataatgtatcggtaggaacagttctgataatcatgctttatggctgtacgctgcttccccttcctttgaagtgggacattcgcgggtggacggaaatgcacccgttgaatgggccggcatggtcactctattatgaatatatcggcaatatcctgtacgcattgtttgtccgtaagttcaacaaggttgctttgtccatccttgtttttctggcagcctgtgccactttgcatctctgtcttacggcgcccaatggtgatatcgtgggcggatgggcattgaattgggaacagcagtatgtgggctttgtccgtttgctctatccgttctttgcaggtttgctgctttcacgtctgggctggctcatacgggtaaagaaacgtgcattctggtggtgtagcctgatgattgtgatagttctttccgttccccgtattggcggtgaagatggtttctggatgaacggactctacgaggcactttgcattatctttatcttcccggtcattgtttcgatgggagccggtggcaaagtaacgggaaaacgctctgtaggtatctgtaagttcctgggcgatatctcatatcccgtttatatcactcattatccgctgatatacacatatacagcctgggcatgcaaccataatgcgaccatcaccgaaggtcttccttatatgatactgacctttgtcggagcttttgttcttgcttatgcctgtctgaagctctatgacgaaccggtacgcaaatggctgaccaatcgctttctgaaaggaacgcgtaaggcgaaataaatacatccggagatataaaaagaaacgggcaacttctcgcaagagaggttgcccgttctggttaatacatctgttgggttcaccggaaaccttatttcacttcaatggatttcttgttcttctgtttttcttcggctgagaacttcggcagactgatgttcagcacgccattttctacttgtgctgcaatcttttccttgtccacattgtccggtaatatcatggtctgttggaacttagagtatgagaattcgcgacgcagatagcgaccgtctttcttttcctccttgttttcagtcttcttttccatgctgataaccagattgttgtcttcgtcgatatgaacgttgaagtcatctttggtcattcccggagcagccaattctactttgtactccttttccgtttccagcacgttgatagccggagcggttgcattggctttttccatccattcgttatcaaagaaatcattgaagatacttggtaaccaattttgagttcttctaacaggcatcataattttagtctcctatcctttaagttaaacattcggttagttctgaacttccggtcttggactgctttcgggagccgtttcttaatcactcccatgcagttcctgaaccgttgttcacaaacataatcgcaaaacgtgtgccaattgattttagtttcgctgattaacaaaatgtcactaaaattctgacaaaattacttgttttatgccgttttgtacatttattatataaaattgctttcgaatactatgaatgtgaaatgtttcgcctccggcttattcgtttccctgatagtcgaaataatcaaagtcagcctgtgcctttgaagaagcggatacggcatacaagcccaatatgataccggtaaatccgccagcagtttcggtactgagatagcgcgtattcatcttagctatttcttggaacttatttccggcggtggaatagccgaatgaatagaactcattattccctttgacctgaagctgcacttttccttgggggatattgatttccttttctatatgtttcagttctcccaactgatatctcaggatgatagactgctgtcccttagcatcctgccttataaaaaggtcatagtgcgaatgattctccatgaataccgttattccggcttcgtcctgcggttgccctttctgtagttcaacggatgttgcggctgtgaagtcgatatgttgctgtctgcggccgatgaaagtaggagagtccatactgttcagattgacgggagttgctttcaatcggagtgtcttaccgttcaggatatagttctcctgtttgggattgcgcagatagatccattccggtcccagtttctcggtgttgaaggtagtgcggggagctttcgagtcaaaaggttgctgtggaagggtggggacatccatctgtaaggctatggttccatctccatttaccacaggccaggcattcttatcccatcgtacaggtgcgataaacgtttcgcgccccagcagatgatgtgagccggtttgcggacggaatgcgagacataccatccaccacgaaccatcgtgggcttctatcatatcggcatgaccggttccctgtatcggactgttctgtgcgtttttgtttatgtgtgtcaggatggggttggcaggattactttcatacgggccgtcaatatcccggctacgggcaatggttaccttatgcccatattcagtacctccttcggaaatcagcagataataccaaccatctttcttataaatatgtggcccttccggatggcgtccgcccgtaccgttccagatacgtttggattcgcttaactgttctccggtcatcggatttatttcgcacaggtagatgcctacatccggattgctgaccaaatagcactttccatcttcaaaataaagggatggatcaatacctccttgctttatccaaacaggttctgaccattcaccacgtgggtcagtggtgtgaaccaggaaattccccttgtccgaaacattggtggtaatcatgtaaaacactccctcattgtatcggatggtaggggcatagattccgccccatgtgccggcattggttaactttacctgtgattcccgtgtcaggcaattccctatctgttcccagttgaccaaatccttactatgaaacaggggtactccggggaaataacagaaactgctgttgaccagataatagtcttcgccaacgcggcaaacactcgggtccggatggaagcccggaatgattggattttgatatccttgttgggcatgtgagagatttgccagtcccatcataataaagatggataagatgattttcttcatatatgtgccttttaaaatgatattattgcagtttgaaacgcattctccaccgtttggcttcttcattccagtcgtggctgatgactttgaaagttcctacttcagaagtattctttacatgcgttcccaaacaaagacattcgtcataattgcctactttcactatgcgtacagtttccgaagcatcttcaggcagtcgtttcaagtcaaagcgtccttgtgcttcttcctgtgtgatgaattctgtggtaacatccaatccttgcgcaatcactgcatttacagcttcttccagtcgttttacatcttcttcggtaggagcagtttccaaagcatagtccagcttacttttctttctctctatatgtgcggatactgaccgtccacaaccgaaaagattcatcatagtacggttaactatatgctcgcaggtgtgcatgggtggatattcctgtttgttgtggtcgttgagttgaatttgttgttccataatagacattcttattttttagacataagaacaaaagtacaaattttttcttatgagttattctttatgtttatattctctgaattttctttttatttcgatacgttcacctccaaaatttattaataaaccatgatctgtattagtggcagttaagtaatttactagttgggtttcatgtattggaataagattttgaacagcttcaagaaaaccagcggcaaggtgcattcttacattatatgcatactgaataatcgtttttattaagctctctatctccatttctcaaatatttttgttcttatgttcttttgtcttaataaaaagataatatgtctcattggtgtaccttataccatgtcagtaatttatggataggtctttctttcccaagaataagttgattgcttttcggaaaaggatatagggtaatgaggcgaacaccactaccaaccgtataaactccttgacatttttctttcttatttgtttttcgtaaccaaatatgtgtcagaccttctacatgttcaagtggaattgtgctaatacattttttatatcatctattgttatagggaaatagaagtctttggacggattctctaccatatagataggtaacttgtcgaattctgatggttttaatagcgagtgtttttgtcgatacctacaaaagtagctataaccaatgaaatttactaacttctttcctttttctttaaacaaaatcctcttgcaaaagcgcttgtgagtcttacaagtacttttatacagcgcaacacatacataattaagataaatacttctcccacaagtaacgcaacggtccgaacaaccttccggtcacactccgttcatccgtcataacttccgcaattccggttagttcacctttaaactccaatactttcccataagacgtccgtaaatcttgtggtaagcttacggttacggtatacatacttttatcatctgtcagtagagagacggataccacttttcccgtcagaaatccgaattccatataaggatatcctgtcacactgatatttacccgttgtccgggtttcactttgcccgaaccgttaacgggtagctttatcttgccgataatatccccggtctgcgaggccacgatggagaaaactttatctccgctgttcacattctgattcttttgccatacatcgttgtaagatagtatgccatttgccggactaatgaagagacatgtcattttccagtcctcaatgcctacctgtagctcatcataagcagcttttaatgttgctactaagttgttagcctcccggcttcgttccatttgagtttccagaatattttgttgcaactgtgcttcctgtattttggcggatgagagcgaagtcatcatttgctcttgtccctgctgcttgttcagaaatgcctgtttagcctcttcatagtccgattgtgccgttagtccttcaccaaaaagtttcttttcccggctgtgtacagtctcagctatacgtacctgttccttatccagttctgcctgacgattcagatgttttatatagttgcgatattcctgcaattccttgcgagttgcctctattttctgttcgtaaagatctaaagacaggaaattacgataatctgtcaggctcttgataaatgtggcataggccgcctgtacactgcccaaagctaactgttcgggaaatacagtgctgtgtatgcaactatctgtcaggcagaaatcctgcaagattttttccagtagtaaaacatcctttgtctctgccggattttccagtacggcaatgatcttaccgactttcacctgttcccggtctttgccatatacttcctttattttcccatttccccgtgccactatccacacgggtggatgctccgtagtgaccgtaatttccgcactcactacatccggatacttaaagaaacatcctccgataaagaacagggccaacacagtgaagaatactgtgattccccaccttaccagtgcatgtggcggacgtgtcagtatctcctgcacctcctcacacctcagttcaatatctttttcttctttttccatgcctctcagacttcctgcttatcagagttccaactggtttttcactaacctgtaatagatacctttctttacagtgagttcctcgtgtgttcccatctctgctatatgtccctgttctattactactatcctgtctgcattcctgacggtactcagcctgtgagctaccactactgatgtccttccttcgaaaaatttctgcaaattctccatgatgatgcgctcattgttagcatccagtgcattggtagcttcatcgaagaagatgaattccggattcttatatacggcgcgggcaatgaggatacgttgtttttgtccctggctcagtccatgcccttcttgtcctatttttgtgttatatcccagcggtaattctgctataaatccatgtatgtttgctacttctgcggcgtggcgcaagcgttctttatctatgtgttccactcccggcgcaatgtttcccgcaatgctatcagagaagataaacccatcctgcattacgacgccacactgtttcctccactcccggatactataattttccaacggtgtatctcccaacagtatttgtccgcttgcaggcggatagaaccccaataacaactttacgagtgttgtttttccacttccgctcataccaaccacggctgtttgttttcctgcttttatctccagattgatattatccagtgtcggaaattcgctcaacgggtcgtatttaaaacttagattctctattctcaaatcttttcccacagggatttcccgtatcaattgttttgtaggttcttcttcatccggcttgtcccgcacttcacccagacgattcatactgaggcgtgcatcctgcatgtcgcgtgcgaaagttatcaaatcattcacaggactgttcagttgcccaatgatatactgtacggacagcatcatacccagtgtcatttctccccgtaccacaaggcttgctaccaatcccgttattataatgttcttggtttggtttatcaataccgctcccgaatcctgatattgtcgcagggcaaggctacgaatattcactttgaacaattgtgcctgtatgcgttcccattcccaccgtttttgttgttcacaggcacttagcttgatttcctgcataccatttaccagttgtaccactgtactctgattggcactctgctgtgcaaaacgcttgtgatccagttccgcccgcttcttcatgaaaagccaaacataagccacatagaacacactgcctcccatgaagataaggaaaatcatccaattatagagtaacagtacaataccgaaaaccacgatgttgaatgtagaaaacactacactcaaactacttcccgtcaggaaattctgaatacgtgtatggtcgttgatgcgttgcaggatatctcctgtcattttagtgtcgaagtatcccatagggagcttcattagcttaataaggaaatctgaaatgagggcaatattgatacgtgttcccagatgtaacaatatccagccacgaataaactccacggcactgctactgaaactcaacatgagttgagctatcagtattaggtatataaagctaaggttttgattattaattccaaagtctacgatggattgtgtaagaaatgggagcattagttgtatcatgctgcctaagagcaaacctaacaacagttgtccaatcaaattttgataggggagaagatatgaatatagaaatctaaaacctttacggtcaatggtttcatcttcgtctttcatcgcatagaattcgggagtcggttccagcaacagcgcaacccctgtattttctccattctttcgcgaacttatccagcaacggctaaattcttctttggtatatttcagttttcccgctccgggatcggcaacccatacttgctgattgtttattttgtagactgtaacaaagtgctgttgattccaatgtacgatgcagggcaggggagcttccaggagtttgttataatctacttgcacgcatatactccgaaagcctaacttctcagcagcctcactgatacccagtatagatacaccttcacgggtgatgaatgatttttcccttaacccacccagtgaatagtgcttaccatagtaagcagacaccatgcggagacaggtggggccacagtccatgacattatgctggatgtaaaaagggaaacttttcatagctacataatcctaaaacatttagaacgcaaatgctcttagaatctcatttttgaataagactgtctaaaacttgtataagcctttctccacgcaaatcttttgcaatgatacgttgttctttatctatcaaaaagtttgtagggattactttaatgttcaactgccgcaataatctggagcgttggccattaggatatgtccctattagatgcttaaatatttgtgtagaatcttcatttatagctttctgccaagcttctcgtttatcatcaagagaaacagcatacacggcaaaattattagggtatttctgtaaagcatgtttgattgttggcatttcttgacgacatggtttgcaccaacttgcccaaaaatcgactaatgtataatctatatctaaattacttgttgatattttatttccttctatatcaaaaaaagtaagtgctaacttgcttcctaaagatagatccagtagttcaatttgaagtctattctttctcaattcaaaaagtctttctcctgcattctttgattcttcggatataggagcaagttttctattccccacagactcctgtaacatgagatgattaggaaattttttagctactaattttgataatgcttttatttcaggttttctttctggaaaatctactgataatataatataagcatcatggactatataccccaatttagctgttttaagcctgttcattgatttaataaaccactcggatttaagatgctcaatactatcttttttatcttctgaaattaaatcttgcaatttcgaacgatatgccattctctcttgccaaaagacgtacatgctattgttaaactcccctttaacggcttttttataggaaaaagactctccgtcagattcttccacattcattataacacatgaatccggttctattggaagcgaaaagttaggaccattttttgaaaatagtattgctgcttcacattcaataggtatatttgcctgcaattctgctttacattggcctttttcaataaatacagagtcaaatataactctttcattaccagagagccactccttgaaaccatatagataaatccattggtcctcgctacaaacataattgtctaaaagcaagacaatcttagctcttttttcactagggccagagtttatattttgagaagaaaaacctaacattattgtcaatagagcggctaaggatatgcaaataatagatttcataatgatatatttttaatgagaagaaaagcccaaagtagcaatttatgcaaatatttagacatacaaaactccttaatatccttatatattagcatacttttggcttttcttattagagattaatttcataagcagaaagaaaccttaaaaacaggcttctttttagaatctacttacacacaatgccatttgcatccgggtgttgggcccttaatgttttttcagcgtcggcaattgaaacattttgttcgatggttacatcaaaagttccacctaaagcgtcattatatgtaacatgacacttacgactaccacctttaactgcacccatttgaaccttgttcagtctgaatgcttcaaaactacttaaatttttcatggtaataaaaaattaaaagtaaataaaaaagttagctcggatttttttaagctggctccaaaacagctattacttctcgagaataatatctttatgtcaatgcatatcttaaatctgatagcggatatatttctggtatatagtgtttattcactataacagagggagtttggtttattttctgttcccgacaatatacctgttgctttatccacaaatcttgtactttagttgttatactgtaattgtctgcctctttaatatgttttgtttcataccactctcccaaaagttgcattgccttattccagccatcagtgtaataagctgtaatgataatttgcgcaacttcctcaccttgtttatcatttggaaatgtcagtaatactaatgataccgggatttttgaagctatttcttttacatgacggtgaattcttgcacagttcttacaattgggatttgttactatcatcactccgctatcacctgtatttttactatgtagtgtgatgtctaggcctgccatctcctttatttgaggattgagtgtcagtagtttttggaatatttccggattaaataagccactaaaatgcttctttatagaaattctctccttctccttattctgaatagtccttagttgtattccaagaatcagacagatgcatcctatagtagcaaacgcaaagaatgagtagaatgaaaaaactatatcaaagtagtttcttaacacataaagagtaatcgcattgccccatactgctaaatttactaacatgcaaagcatgcaacctttttggaggatgaagatctgataaataatagaatataaagtagataccaccgcaatcacacagcaaatgatagaaattccataaaaatcattccatcgggtcaaggaaaaccaaaaaagaacaacaaagtagagcagagataattctcctaatcctacatctgctatactcgaccctttggaatgaagtacttcattgcagttcactactttccctatatggcaaaactgctccatgaattgcccatttatctgttctttgtaaaggatagcgatagacacaagaattccaaaactcaatgtacataaatagataataaatacaggtacttgattctgaaaaaaagcagtctggattcccaatattaagataaaaagtatagcaatgataaatttataacgtagcaaattgaaaaggatattttttattacgcaaaaatgttcgtttgatgtcttttcagtagcttctccgaacaagacagtacctgcccaatgctgcaagaacttgtctaccgatgtatgatgtttttttccgtctccattaaggaattctacgatgaaatcatcctttttcgtcactacacaaaattgatttctgtccaccttaagtattgtaatgaaaggagcttccaattgtggaaaataatcgtgtggcggaagctgatatacttcattctttacatgaagcacatccaatgcatcactgatacttcgtatgctatctcccaacggagtgttgagcaaacgacgcacggtgcctctactcacttttacagatagtgcccgtaaataatgatagagtacaatgtcgatattattaacttcagtcatgattactttcgtctatttatcagaatgttataaagagaaatgtccttccaatgatatttcattagaaataatttctatcatataatctccggtatcttttccgtttaagtcaatagaaaagcttgttggattgatgaacaactctgaagaaactatctctccggtagtttcattagtaatattgattgtaacagtagagaatactgtttgaaaatcaattgttactaccttattatataaggaagcacatacaggttgggaaatagtactacgaactttaggggcgtcttccggacttgtatcaccaacttgctcacttggttccctgtcaccattcttttgtgtgagaacgatcacagattttccaaaaatagactgtgcattaacagaaatgccgaaagctaaaaacgaaaataaaataaataatacctttttcatatatatcagacttttgttttgtgctgccaaattacaaaagtctagacgaacaaagtgtctcaaaagtgtctcacgacctaattttttgcaaaatttcttcaaaatcacaatcttgcttagtatcaattcgcttaagtagggcatttttctttcgatagagtgttgctctggagagatgcaacaagtattctaaatgggagaatggaaatcctatcaaacttaaacatatcagatgaagttcttctttagataattgatactttgcacaaagctctgttatggcattattccattccatatccatctcggccacaaactcctgccattcctgatcgcttaattctttatcagatgtatctttatcctgataatctttaatgatagcctgcattttttcataaagtggcgagtgtagaaaagcctcttttgccagagctttgcgcttcaagaccatttcgtccagttcgtcctgtagcttttttctttgttcttcattgacttgatgcgaggctaattcttttctcagactttcaatctccaaatctttttgtactatatcaatctgtagcttggcataatgttgacttaaatcttgatgtgccttttctaattgttgcttatccttttgtaataaatagttttttcttcggtatcgtttgtatagtaaaatcgtaattatgataattattactattatcagtatgaaaacacataggtatgtatttaaacgccatttataatatagcttttggagcatggtttgcgcatcagtttctgctttgattattttattggtaactatatttcgacgaaatttatataaactgtctttgtatgcagaacaatttctttccaattccatagataaagttgcatttccctgaatcattgctatatctgctaaacgcatataagcatcggcctttcttccgtagtctttgctcactaaacttttatttaaatagaatgtagcggagtcatattgctcggatttataataagcatctcctaaaataaaaaaagccctataagctcgtgcagtgtctcttcgcaaggaaagatttaatttagcataatgcaaagccttttctttttgttccattcgattatacaaattacttaatgaagctgaaatattggcctttaaaccgtcatttttcatcttatctactgctactaaagcgtccagcaacttttgctcagcaatagggaaataattttcccctttcattaaatcgatagaagcttgtctggataaggcttctgaccaaagagtcgtatctcttaattctttggcaattacttccattaaccgatagatagaatctgccttttgattgaattcctgtatattatagatatatcctatattattatatattaaccctaattgtctcttttctttgactttttccgtcaaaggcgcagcaataaaaaattctctgatagcttctgcctgctgattcatatccctatatacacatccccaataataatgtgcctttgcttgcatctttgtatctccaatagaatcataataatgaaccgctatccgtatcaatgaatcatccttctgtacaacgaagtttttatcttgcgcttgcgtcagcagcaatgcatagtatgcattatcagctcgtgtagaaagtttttcaggtgaaatgcttttaagaatattcaaggcactatccggacgcagctgcataagtgaatctgccttaagtaattgctggttgtagtcctgccgaatggtacaagacgatagcaaagacatagcgaataatataataatgacagtatttttcatattgtttgtcgtattttcaattagatatagtccacttgaagaagcggtatttttttatgctactaaggtacaaaaaatattcagacggaagtatggcaaacattataaagaatgaaatattattcataatggtgcaaatcactgaatcattgacaccatttgtcactaccatgtaaagtaagctgttagtaattcgaagaaaagtaaaggctttaaactgtaaacagtaaactcgatgatgtgcagaaaagtgcagttcatgattgtagtgaattacactttctttatatttgcgaatcattataagtgtgtgaataaaaaaacatccagaaaagatgtaaatgctttatttacgatcctgaatgataaaaatgataaagaggttaatacatttctgcctatggtttctgttaaaggatatagaagaggcgaaaaagtgttacagaagatattggaataaatattctactcattttatagaagaaataccttaaacttatgattattcttattgcaggagatacgcatacgggaaagaccttgctagcacaaaagctattggagaaatataaatatccctacttgtcaatagatcacttgaagatgggagtcattagaagtggacaatgtaaattgcctgctgatagtaatgatgcagagctaacaaactatctgtggccaatcgtcagggagatgataaaaacctgtattgaaaattcccagaatatgattattgaaggatgttatattccttttggctgggaaaaggattttacggatgaatatgtaggacaaataaaatacgtatgccttatattcagtcaagagtatataaggcatagtttccaaaatattctggaatatgaaaatgttatagaaaaaaggctgtcaacagatgtaacctttgagaatgtaagtaaaaccaataggtataatttggaacaatgtatatcaagaaagtataattacattttaatagataagaactatcgaatagatacagatgatatataagtttccctgagctcactcatcattcaggaaaccacttttgggtattatttgctatccgtaccagcataagcattatcggaacctccacaagtacacccacaacagtggccaatgcagcaccagattgtaagccaaaaagagagatagccacagccacagccagttcaaagaagttacttgcaccgatcattccggccggagcagccacattgtgaggtaatttccaccattttgcccatccataagctacaaagaaaatcaggactgtttgcagtacaagcgggacggctatcaaaagaatatgtaaggggttattcaatattgtttctccttgaaaagagaacaggataataagtgtcaaaagtaatcctccgaccgtatagttatcaaatttacggataaatacatggttgaagtattctatccctttttgcctgataacccatgtccgtgttatcactcccgcagaaagcggaatgacaacgaacaacaatactgacagaaacagtgtatcccacggaattgtgacaccgccgacacctaataataaggcaacaataggagcaaaagcaactaatattatcaagtcgtttacagctacctgaaccagcgtgtaggcggcgtcacctttcgttaagtgactccatacaaagaccatcgccgtacaaggagctgcaccaagcaagaccgcacctgccagatattccttagccaaatcttcgggtataaataccttaaagatgacataaaagaatagataggctattccaaacatcgtaaaaggctttataagccagttcgtaacgcaagtaacgattattcctttagggcgtttacccacattcttaacgctttgaaaatctactttcagcatcataggatagatcatcaaccatattagaattgccacaggtatagaaacattggcgtattcaaattggctcaaggtttgcggtattgccggaagccattgtcccacggcaattccggcaataatacacaaggcaacccatagggtaagatatcgttcaaaaaatccaattccttgcttcttttccattatatgtttctccattctatcagggctgtatttccctgtgataattgttctactttcttgatccaaactaattcgttttgcgctttcgctttcaggaacgaattttgagtatctgtcaatgagaggcaagcatttaccacccaccatttattgtttatcccggcacgttgtaaatccatttgaaggcgttccgcttcaaagacaggggttgcttcgggtaaagtaacaatcactacttccgtctcctttgaattacgcaggcgaggtaacaggttggctactgctcccgtgacttctccttgggtacgctcaacctctttatgataactttgagtggcgtccaaaagcaataaagtatgccctgttggtgcggtatcaatcacaacaatctcggtttcagccttatccacaatctcggcaaaagctttgaatactgcaatctcttgtgtgcagggagaacgtaaatcttcctctatgtactccatgtcttcagcagtgactgcttcggctgctttgttgcggacttcgtttttgtacttctctaaaacctccgcttcatcaatccggcttaccgtgataccggcttttacggcaagttcataattcagatggtttgccggatcggtagttgtcaaatgcactttggcgccgagcttggttaattttaaagcaatctcagtagctaatgtagttttgcctacaccacctttccccattgtgaaaataacccttttgccagatgtataaagatcgtccaccatctcgtccacacctttgggggatgccgcaggcttataatttacttcactggaaaggctgtcgctatacagcatccgccggatattcactatactggataaattgtatgaccgtaagggaacatgatacaacggataaccggatagttctgcaggcatactttgcagggctttctgttgcctctcatgcagctgactggaaacactgtcgtttttatccaactgttgcaagacaccgtttattattagtatctgatttttaattcctaataattgcagttcatgagaagaacgggcagcttctttcaatggcgcggtttcaggacggctcaccaacattagccgggttgcgcccgtatcggaaagtgtttcaacagcctttttgtatatttcttttcgttcttccaatcctgacagctgacctaaacaagatgcgccatgggtactttcactgatgaatgtgctccacgctgatggtagttgcaacatccgtaaagtatgccctgtgggggcagtatcaaagattatatggtcgaactctgattgcttttgaacatcggtaatgaagtccgagaactcattgaaagcggcaatctcaaccgtacatgatcctgacagttgttcttccatgttttggatcacgctttcaggcaactttcctctgaaaggtgcgatcaccctttcccgatattctgccgctgcttgttcaggatcaagattgacaaccgtcagccccggaatttctgcaatctctgaaccgtgtccgttaagcgattggttgaagacgtcctgcaagttggaagcaggatcggtactgataagaagtattttcttgcccttgtctgctaatcccacagccgtagcgcaagcgatagatgtttttccaacccctccttttcctgtgaaaaagagatattttgtaaggtcaatgtctgataaattaaatgctttcattgtgctgtaatgcttttttgtttcaaatatcattttgtgggcatgaagtctaaatttatgccggtccattcactcatctgccgggtggtggggtaggttttagataccgccacttcaccatccaccagggtgatgggtaatgcttccgcaccgtgtttttgaagataattgtttacggtctgattgctaacatatatctggggctcgtccctcagattatgacggataactgttaccccttgtctttttaatgtttctatagcgacagcaatccgcattaattcaggattgatgtttgttccgcacaaacccgtaggacaacacattgccgggtcgaaaatttctatctttttcatctttactgttgattttgattgttaaaacttactttatagataatacatgactgcataataaatccccaccgcaataaagaggatggcgaccactttacgaaaccatttttcgaatacttgtattctgttatagagcttgcctaatccggcaacactatatgccaatacccaagctacgaggataacaggtaatccggttgcaatcgcataaaccactggcaaaagatagccgcctgtttctgctgccgacattggcataagcataccgaaatagaatattccacttgtagggcagaaagcaagggaaaataagattcctaagaatagtgcaccccagcttccttttgtttttctcttcagattattcccgctaaagttgattttaggtaaattgagcttgatgatgtcgagcatataaataccaattactattaatagcggggcaattagcatttctccatacttgcttacagccttttgtacggaaaacatacttgcaccttcgcggagaatgggaataaggataaacccaagaatcgtataagtaattattcggcctaaagtataaagcaaaccattaataaatatccggtgatggttttcaatatccttgccgataaatcctatcgccgttatattggtagctaacgggcatgggcttatagctgttaatattccaagtataaaagctgttatggcaggaatggaagtattgtctaatattgattgaagaaagtccattgatatcttattttagcaattcatcaattttatcttttatgccgttcttaaatttgtcgggatgactttttgcattggcaaaactaaactctgtcatattattgaccttctcctgaccgctcttccatccatttacaaacaaggatgaccatgtcacttcgtacttatctgcaatcggcccattcttcttttgagaaatatcaattatcctatagacgattcttcccgatgctatttcctttgaataaagattgtctaaaagtgcttttgtgttagtttcaataacccgacaggttatgcatcgttgtgctccatgaaaataaagcacttccacacggtcattctgcatagcttcgctatttgctgtttctgttttctctttgcctccgtttccgcaggaaactaaaatgacacctgcaataaatacatggaataactttttcatggcatgtaattattgggttagtaattcttttacttctttcaatgacaaccgtttacctgccgaaacgactttcccgtctataaccaaagccggaagacttaatatattatattcgatgattttcaataaatcttcctcttttaccaaagtggcatcacttcctaattctgcaatagcttgttgggtggtttcgtacaaagttttgcaactggggcaacctgtacctaatactttaatttccattatcagatagcttttaaatgaataatatgtataatcgtagttcgtagaacaacgaacgttatttataaaaaaaggtgctgtttattcacagcacgaagtacatttacattcaccgaagaatccggtaaacaatttacgggcaagttcccagttttcacggttaatgcaatacttgactttcggcgtttctatttcaccttgaatcagtccggcatcttttagttctttcaggtgttgagaaactgtcgccttggctattggcagttcttcgtgaatgtctccgaagtagcaactttcctgtctggctaaaaaattgaggatagccattcttgcagggtgtcccagtgcttttgcaaagcgagctatttgttcctgctctgtggtgtactgtttgtttttcactttatatctcctttttttgtttgttgttcgcaaaacaacgaacaatatttgaaacaacaaaataaatacgattattttttagattaattaaatgaatgtttgccttgtggggattttcatagcagaaaagtagctatgggaaaactggtttgtagtacttttcttcctaaaatgatatgtatcttatctctccgtttttaaagaatatacttacttatatgtacatgtcagcgctacttacatgcacatgttatccttctctacatgcacatctcaatattgctaacatgcacatgtaagcatctccattctttaaaaaagtatcgcctttactttaaagatattgtgatttaagtgctatccgcatgggattctatcaaattttacttatttttgcatagaacttcttgtagaagcaacctttaaccaatcgaaactcagatgaagaaaatagtcacatccttatatctattatgttgtgtatgtatgtgtcagctccatgccgccaacaatgttgtagactcccttttatcccaactggaccatgtaattcaaaaccgccctgtatacatcgagcaaaaagaaaagaagctgaacgacctgagacaagccttgagacaacgcatttctgacgaaaaccgctttaccctgttgggggaatatctggatgaatatcgttcctacaacaccgactcttcgctctacatctcacgcgagagataccaggtagccctgcgaatgaaaaacaaggagcatcaggacaacgccctcatgaacactgccgagattatgggcacagcaggcatgtataaagaagcagtcgacctgatgcataacgtacaaatcaatcatctacctgatgacctgcacccgtattattaccatatttaccgcaccgtctatggcctcatggccgattacgccgttacggaacaggagaaaaaactctatgctgagataacggatagataccgtgattccctgttgctggtcaacaaagacaatcttctggtgtacacgctgattcagtccgaccagcacaatgtgcggggcgagttcgataaagccattcagctattgaccgactacctggcgggacagatagacaatgtgcatgatgtggcaatctgtgcctacactttatcagagtcataccgcctgaaagaagacacagaaaaagagaaggagtatttgattctttcctccattgcagatatgaagtccgcagtgcgcgaatatatttctttgaggaaactggctgtgttgctctatcaggaaggagacatagaccgtgcctattcgtatctgaaactgtgtatggacgatgctgtgttctgcaacgcccggttgcgtattctggaaatcctgcaaattttccccctcatcaacgacacttaccagcaaaaggccgaaaagcaacaggaacaaatgaaatgggcgttagtctctatcagcttgctgtccatcttcctactgatcgccatcttctatgtgtataagcagatgaaacgcgtagcagccgcacgccacgaagtgatagatgccaacaagcgcctgaaagaattgaatgaagaactccaccgctacaatctgcaactgaaagaagccaaccacatcattgccgaaaactcctacctgaaagaggaatacatcggccgctatatggaccagtgttccgtatatctggaaaagatggataactatcggcgttcactgggcaagatagccgctacgggcaaggtagatgagctatacaaaaatatcaaatcttccaagttcatagaagaggaactgaaagagttttatgccaattttgataacaccttcttgcaactgtttcccacttttgtagaagacttcaacaccctgcttgccgaaggggagcagatttaccccaaggccaacgaacgaatgagtaccgaactgcgtatcttcgcccttatccgtttgggaattaccgacagtgtgaagattgcccaattcctgcgctattctgtgactaccatttataattaccgtaccaaagttcgcaataaagctgcgggcgaccgtgaccaactggaacaggaagtaatgaaaataggtaagtcgagagactaaaaccacacttttaaggcatataagtgtcttttttacgcttatatttttactacttttttggaacaatgcatcttcttgatagcattgattattagtgttttatatcttataaaacgcctaaaactactactttttcactcttttcccccttattgcttcctcttatcagatacatttgcattgttccttcacagaggggacaaatgcatgtgaatctatatttttattactaactttaaactcttatattatgcaaaagtacaaaatgccgatcaggcttcgaatcatggtttgtctgataggaatgttacttccgatgtgcatgttcgcacagcaaatcacagtacaaggtgtagtgaaagaccagaccggagaaaccgttatcggtgccagtgtggtgcagaagaacacaacgaacggtacgataacgggtattgatggcgatttctcgctgaatgtgccttcggatgccgttatagtagtttcattcgtgggttataagtctttggaagttcccgtgaaaggacagaaacagattatggtaacactctcggaagacagtgaaatgctggacgaagtagtggttatcggttatggaaccatgaagaaaagtgaccttaccggtgctgtttcctctttgggaagcaaggacatcaaaaatgcccctgtttctaatctgggacaagccattcagggccgcatctccggtgtgcaggtagtggatgccggaaagcccggtgacaatgtatctatcaagattcgtggtctgggttccattaacaactgcgatccgctggtggtgattgacggtgtgcccaccgacctggggctgtcttcactgaacatggcggatgtggaacgcctggacgtattgaaagacgcatcggctacagccatttacggttcgcgtggagccaatggggtagtgatgatcaccaccaagcgcggaacggaagggaaaggaaaattgtcggtatcggctaattgtgctttccagaatgccacgaacgttccttctttactgaacgcaagccagtatgccgatttgagtaatgatatgatggtgaacagcggtcgcaacccgaacccgaattgggcaaatccttcggaactgggtgcaggtaccgactggatggacgaattgctgcgcacgggtgtgatgcagaactatacggtaagttattccggaggaaatgagaagtctcattattatgtatccggtggttttctcgatcagtcgggtacggtgcgcagtgtaaactatcgccgttttacgtttcagtccaacagcgatgcacaggtgctgaagtggttgaagttctccaataatatcactttcagcactgatacgaaggattcgggcagctataatatcggtgatgcactgaaagctcttcccgttcttccggtgaagaatgaagacggctcatggagtgggccggaaggtaattcggaatggtacggtagcatccgcaacccgatagggcctacgcaactgaacaagagccagacgaaaggttataacttccttgccaacctgacggcggaactgacttttaccaaatggctgaaattcaagagcactttcggttacgatgccaaattctggttcatcgataacttcacgccgaaatataactggaagcctattccgacggaagaaacttcacgttacaagagcgataataaatcattcacttacctgtgggataactatttcctgttcgaccatacctttgcagaaaagcatcgtgtgggagtgatggcgggatcatctgcacagtggaatgagaatgattacctgaatgcacagaagaatgtcttcatgttcgacaatgtgcatgaaatggataacggtcaggagatgtacgccattggcggcagttccaatgaatgggcattgctctcttacatggcacgtatcaactactcttacgaagaccgctatatgctgacggcaactgtccgccgtgatggttccagccgtttcggtaaaaagaaccgttggggtacttttccttctgtatctgccgcatggcgcatttcgcaggaaagctggtttccgaagaatgacgttgtgaacgacctgaaaatacgtgtaggatatggagtgacgggtagccaggcaagtgtcggcaattatagttacctggcatcttacaacaccagtgtatatccattcggaacaacgagcggcaatcagaccgcattggtttcctctacgcttgccaatccttacatccattgggaagaggtggcacagacgaatatcggttttgatgcttccctgttcaattcacggatcgtattctcgctggatgcttatctgaaagagacaagggatatgttggtgaaggcatccatccccatcacatcgggctttgaagataccaccaccacttatacgaatgccggtaaagtgcgcaaccagggcttggaaatgagtctgcacaccatcaacctgaccggagaactgggttgggaaacaaacgtgaccgccacttataataagaataagattaaggacctgaacagcgcagttccttactatatcaaccagatcaacaactcgtatgtcacgatgctggcaaaagactatccgattaatgccttctacggctacgtgacggacggcttgttccaaaaccaggcggaagtggatgcgcatgccgtgcagccgggagctgaaccgggtgatatccgtttcagggatttgaacaacgatggtgtcatcaacgacagtgatcgcactgtgattggcaatcccaatcccagttggttcttctcaatgaacaataacttgtcttataaaggattcgagctttccgtattccttcagggggtggccggcaataagatttataatgccaacaatatcgacaatgttggtatggctgccgcatacaaccagacaactgacgtgctgaaccgttggcgcggagaggggacaagctactccatgccgcgtgccgtgttcggcgatcctaatcagaactgccgtgtatccgaccgctttgtagaagacggatcttacttgcgtgtgaagaatatcactctctcttataccttcccgaaacaatggttgcagaagttacagatagagaatgcacgcctttccctttcctgtgagaatgtggctaccattaccgggtattccggtttcgatccggaggtggatatcaacggtattgatttgtcccgttatcccatttcccgtacattcagtgtaggattaaactttaacttttaattgatttggatatgaaaaagataacaaacttactatacgtgctggctgtattgatgctggtatcatgtaacgactttctggataagtcgcccaaatatgccgttgaccctgaaacaaccgtgaccgatgatgtggccgtggcactgacaaatgcttgctacaaggcgcttcagtcttccaatctctacaaccagcgtatgtggtcgctggatatcgttgcgggcaacagcctggtaggtgcaggcggtggtacggacggtctggaaaccatacaggcatccaattttatcacgcagagcgataatggtatggccctgtatatgtggcgttctccatgggtaggtatcgggcagtgtaacattgtgctgaccagtcttccgcaggccgaagccgtatcggaaagcataaagaaccgttgtatgggtgaagcatatttccttcgtgcccattactattatatcttagcccgtttgtatggcggcgttcctttgcgtctggaaccttataatccgggtgaatctactgcaatagcacgtactacgttggatcagacttatgagcagatcatttcggactgtaagaatgcggtcgatttgcttccggcgaaagcggaatataatgaagaagaaaaaggacgtgcctgtaaggatgctgcccttgccatgctggcggatatctacctgacactggctcccaaccatacgagttattatgaagacgtggtggaactgtgcaatgagattacgaacctgggttacgacctttccacctgcaagtatgaaaataacttcgatgctactatcaataacggtcccgaatctctgtttgaagtgcagtattccggaagtacggaatatgatttctggggaacggacgggcaatcttcctggctttccacttttatggggccccgcaactcggactttgttgcaggcagctacggctggaatcagcctacggaggaatttgtgagccagtatgaagaaggtgacaaacggaaggaactgacggttctttatgcaggttgtccggactttgacgggaagacttacaagagttcttattccaataccggatataacgtgcgcaaattcctggtgtccaagaccatttcgccggaatacaatacgaaccccaataactttgttgtgtaccgctatgcggatgtcttgctgaagaaagcggaagcgctgaatgaaatgggacaacccggccaagctgccgctcccctgaatatagttcgcaaacgtgccggactgccggaagtttcgggtctgtcacaggaggcgatgcgtgagaagattattcacgaacggcgcatggaactggctttcgaaggacatcgttggttcgatatgatccgcgtcaataatggagagtatgccatccgtttcctgcaatccatcggcaagaacagtgtgaacaagaatcgcctgttgttccccattccgcagacggaaatggatgcgaatatactgatgacacagaatccgggttattaatcacttaaatcagaagaagaatatgaaaagatatatttcacatttagtatttgcattgctgggttgcatggcactgtctgcatgtgtggacaatgactatatggaactggacaaggggcacaatgaactggcgctttccaccagcaacacggaagtcgttttgaacgaacaggcgcatggcgatgatgccctggaactctcctggacaacgggcacgaattatggtacgggaaataagatttcctatacactggaacttgccaaggcgggcagtaattttgccgctccttatgtggctttggagagcgtcgtgcaggaatatacctggaagaagaacgtggaggaattgaataacatccttcgtgagcatttcggtgcggaagctactgaaaacatctctctggaagcacgcctgacagccaaagtaacggatcgggaagagacacaggtggccatcacctcttttagtgtcactgcctacaaaccgttgacttccactctttacctgataggtgatgccactcccggcggttggagtgcggatgatgcaacggaaatgacccggaaagacaatggtatatttacatggacgggaaaaatgactgcgggttccttcaagtttatcactacgctgggggctttcttgccgtcgtacaacaaaggaactgacggaaagctggtgcttcgtaccagtgccgatcagccggacgaatcgtttacgattgaagaagagttcaactatgttgttgaagcgaacctgtttaccggtgctatcacactgactcagaccgagaacctcagaccggcttacgatcagctttatttcgttggaggtatgaacgactggggatttgtgccgatgaaaaaggatgtgctcgatccgttcctgttccgctatgcccgtttgttcgatgcaggtcagggcggggaattcaagttcggaacttcggaaggaagctgggagagcatgtataaggcaaagaatgccaatgccgcttacaccgatacggaaatggtatttgtgaaagggttcgatcctgacaataaatgggtgctgaaagatgccgaatgtggtaaggcctataagatatgtgtcgatatccgtgcagggaaagagcgcatgatgatgagcgaatttgttccttatgagatgatttatatggtaggggatgctgcgcctgcgggatggagcattggagatgccacgccgatgcaggccacggataatccgtatgtatttacttggcaaggtgtactgaacgtgggtgagttgaagctgacctgtgataagaaagaggactggaacggtgcctggtttatgccgaccgtagctgataagcagccttcgggcgagacggaaccaatgttgttcctggataaggccagcgatgctttcaaagctcaatacctggatgtaatgattggaggtatcgacctgaaatggaagattacgacggctggttcttataagattactctgaatcagttggaagagacaatttcgatagtaaaacagtgaaacgatgaaatatatagtttatgcaatggctgccatgttctttttggcttcgtgcagcaaagacaatgatgaaaccggaggtggtaacggcggtggaggagaaaccggaggagtgactgatgtcactcccgttacctccgatttaaccgtgaacctgactactgacaaggcttgttacaaaccgggtgaaaccgtttccttcacagccgatgccctgcctgcgggagcaaaggtacgttaccgtactttgaacaaggtaatctccgaacaggcagtcgcaggcagttcctggacgtggactgcccctgcaacggatttcaccggatatctggcggatgtctatcgtactaaagaagacggtacggaagtcattctcggtactattgccgtcgatgtatccagcgactggacacgcttcccgcgttatggctttgtcgccaccttcgacgcttctaaaacggaaagtaaaattcaggaggaaatggcttttctgaaccgctgccatatcaatggtgtgcagtttcaggattggcacaacaagcaccactggccattaggcggtacgcgtgaacatctcgatgcggtatataaggatattgccaaccgggatatctatacacagtcggtaaaggattatatccgcattcagcactcgtttggaatgaaggcgatgttttataatctttgtttcggtgcgctcgatgatgcagccggtgacggtgtgaaagaagaatggtacatctttaaaggcacagggcatacggataaggatgcgcatacactgcccgacagttggaaaagcaatatctatttgctcgatccgggtaatgccgaatggcaggcatatattgcccagcgcaacgatgatgtctatgccaatcttgactttgacggctatcagatagaccagttgggaaaccgtggcgaccgctatgattacaaggggaataaggtgaatctgcctaagacttatgtttcgtttattgaagctatgaaggggaaacatcctgataagcgcttggtgatgaatgcagtaagtagctatggggcgtctcagattgcaggtacggggaaagtagatttcctgtataatgaagtttggggggatgaagctgatttcacggatttatatacgatcctgaaagcgaaccatcagtacggaaatcaggcactgaagacggtgtttgcggcttatatgaattatgaaaagggttccggcgagttcaatatgccaggaatcttgctgacggatgcggtgatgtttgctctgggcggttcgcacctggaattgggaggcgaccacatgttgtgcagtgaatattttccaaatacccgtttgcagatgagtgatgccttgaagacggctgtcgtacgctattatgactttatgactgcttatcagaatcttcttcgcgatggcggggaggaggagaaggtaactttggtatgtacggatgcaagcaagaatctgaatctgaacacttggccgccacagaaatcagccattacttcttttgccagaagggtgaatggcaaacaggtggttcatctgctgaacttccttagtgcaaacagtttaagttggagagacctgaacgggacaatgcccgaaccacggttggtgactaaaatgcccttgaagctgaatgttgcggggaaagtgagcaaagtgtgggtagctactcccgatgcacatgccggagcttcgcaggaattagcttttgaacagaaagacggagcgataacctttacgcttccttcactgaaatactggagcatgattgtaatggaataaattataaaagatatagaaccatgagaaaatatatatatttatttttaatactgtgttgcctgtctccgcacttatatggcggaaatgtaacgggaaactgtacttcttattcgcaggaagggagagacgttacgtttcatttagacgataattcggctgtgcagttgcaactttgcagtccctccgttgtgcgcgtctggttttcgccggacggtaagttgcagcggggaaatccttcttttgcagtgattaatgaagaattggaagatgtaggcactgtccgggtggacgaacagaatgcctgttatgagatatttacgcctaaactgcgtatccgcatcaacaaggctccgtttagcttgcagatattcgacaagtatcagaagctcttgttcagtgattatgccgacaaggggcatatcagcgatggagagcgtaaagtggagtataagaccttgcgccgggatgagcatttctttggtttgggtgaaaagaccggcaagctggaccgccgaggcgaatcttataagatgtggaacagtgataagccttgttacagcgttgtggaagatcccctgtacaagagtatccctttctttatgagcagttatcgctatggtatatttctggataacacgtataagacagaattcaaattcggcactgaaagccgtgattattacagctttgaagctcctggtggggagatgatttactatttcatcttcggtaaggattataaggaaatcatgaaacagtatgtcgcattgaccggacaacccatcatgcctccgaagtgggcgctgggctttgcacaatgccgcggcctgctgactaccgagaagctctcttatgaaatagccgaaggataccgtaagcgtggtattccttgcgatatcatctatcaggatataggctggacacaatacctacaggacttcaactggcggaaagaaaactatcagaatccgaagaagatgcttgccgacttgaaagggatgggcttcaaagtgattgtttcgcaagacccggttatctctcaggctaataaaaagcaatgggaagaagcggaccgcttgggttatctggtgaaagactccactacgggtaagagctatgatatgccttggccgtggggtggcaactgcggtgtggtggactttaccattcccgaagtggcggactggtggggagcttatcagcagaaaccgatagatgacggcattgccggcttctggacggatatgggtgaacctgcctggagcaatgaggaacaaacggaacgtcttgtaatgaaacaccacctgggtatgcacgatgaaattcataacgtgtatggtctgacttgggacaaggtggtaaaggaacagtttgagaaacggaatccggatcttcgtgtcttccagatgacacgtgccgcctatgcaggattgcagcgttacactttcggctggaccggagattgtggcaatggagacgatgtgctgcaaggctggggacagatggctaatcagatcccggtacttttatctgccggactgggtgtgattcctttcgtggcgtgtgacatttcaggttattgcggggatattgaagattatcccgctatggcggaactttatacccgttgggtgcagttgggagcgtttaatcctctgagccgtattcaccatgaaggagatgtggcggtagaaccgtggctttttggggaggaagcggagaagaacgttaaagctgccatagaaatgaaatatcgcttactgccttatatttatacttatgcccgcgaagcgtatgaaacgggtttgccgattatgcgccctatgtttatggaatatccggcggatttggaaacagtctctacggatgcacaattcatgtttggtagcgaattgctggtggctccggtggtgaagaagggggcaactaataagaatgtttatctgcccgaaggtacttggattgattataatgacaagcgcacggaatatagcggcgaacagtggactacggcaaatgctccgctgaataccattcctatgttcgtgcggaaaggaagtatcatccctcagatgcctgtgatgaattatacggatgagaaagcggtttatccgattacatttgaggtatttccggttgcggcgggcggcgaaacgtctttctccctgtatgaagatgcaggaactgatctggggtatcagcgtggggaatttatgcgtactcctgtatcttgccggacaacggaaaagggatatgtgctcgaagtcggggaaagagcgggagagaagtatgcccttccgggagaacgcaacctgatgttttgcatttataccgggcagatgccgaaggaagcgcttattgacggacagaaagtaaggaagatgaaagcggaaaaactgaatgaaggaatagaaacggagttcaaggttaccgcatggtgtccggataagaaacagaatctttgtatgttgagattgccggatgacggagtgaaacacacgattgaatttatttattaatagcaaccataaaaagtatagttatgagaaagttaatgcttagtgcaatttgtcttctttttgccttagcggggaaagcagaaggagtgtcgtctccttcgggccaggtgaagctagatttcgaattatcaaagaatggtgctccgacctatcaggtggagtataaagggaaatccgtgattaagcccagcaccttgggactggaattgaagaatgccaataatctgctggatggttttgaagtcctgaaagcttctacctctaccttcgacgaaacctggcaaccggtgtggggagagacgaaagatattcgtaatcactacaacgaattgctggttgaattgaaacagcccgccacggatcgttatatgaaccttcgttttcgtgtatatgatgatggtgtaggattccgttatgagtttccgcaacagaagaatctggtttacttcgtgataaaggacgaacatacccagtttgctatgacgggcgatcataccgcctggtggattcccggtgattacgatactcaggagtatgattatacggaatccaaactttcggaaattcgcggtttgatgcagggagccattactgataatgcgtcacaaaaccagttttcgccgacaggtgtacagacttccctccagatgaaaacagctgacggaatctatctcaatctccatgaagctgctttggtggattattcgtgcatgcacctgaatctggatgataagaaccttatctttgaatcctggctgacgccggatgcacagggcgataaagggtatatgcagtcaccttgtcacactccgtggcgtacggtgatagtcagtgatgatgcccgtgaaatgctggcttccaatctgatactgaatctgaatgatccttgcaagtatgaggatacttcctggattaagcctgtgaagtatgtaggcgtatggtgggaaatgattgcggcaggcaagccgtgggcttatacatttgatcttccttccgtaaaactggatgaaacggattatacgaaagtgaaaccgaatggtattcaccccgccaatacggagaatgtaaagaagtacattgattttgctgcggagcatggtttcgaccaggtattggtagaaggctggaatatcggttgggaagactggttcggtaacagcaaggattatgttttcgattttctcactccatatcctgattttgacatcaaatacctgaatgagtatgcccactccaaaggtgtcaaactgatgatgcatcatgagacatcggcttccgcacgcaactacgaacgccacatggaggctgcctatgacttgatgaatcaatacggttacaattccgtgaaaagcggttatgtgggcaatatcattccgcgcggcgaatatcattatgggcagtggatgaacaatcattacctgtatgccgtgaccgaagctgccaagcataagattatggtgaatgcccacgaggctgtacgtcctactggtttgtgccgtacgtatccgaatctgataggaaatgaatctgcccgtggcacggaatatgaagctttcggaggcagcaagcctttccacacgaccattcttccttttacccgtctgcaaggcggaccgatggattatacgccgggtgtctttgaaatggatatgaataaactgaatccgaatagtcacgctcatgtaaactctacattggcgcgtcagttggctctctatgtcacgatgtacagccctctgcaaatggcagctgatctgcctgagaactatgaacgctttatggatgctttccagttcattaaagatgtggctctggactgggatgacagccgatacctggaagcagaaccgggacgctatatcacggctgcccgtaaggcgaaaggtacgaataattggtttattggttgtaccagcagtgagcagggacatgcttctactctgaaactggattttctggatgctgataaacagtatatagctactgtttatgcggacgcaaaggatgccgattataaaacgaatccgcaggcttacgtaatccgtaaagggattgtttctcctaagactgtgctgaaattgaaagcggctccgggtggtggttacgctatcagcattatggaggtgaaagataaggcggaattgaaaggattgaaaaagctatccggtaatatctgataaaccggaatatctgatagataaaaatccccttcctcagctctccaatcaccaagtacggtaattaggagtgaagaaggggctattttccacatactttttaatagtagcatagtttacttcgatattctcttggggaatatacatacgaggatattccaaacgtatggacataaaaaaaggagtaccgctgtactccaacctttgttaaccttaaatctaatactatgaaaaacacagtgcaaaggtacggatattctgcgtatttccaaatgattagaccaatataagtgtttttataacactaattaaaagatagacattgtttctttactttttttcaaggttttattcgttgatacgctcttttatctttccccaggcatgtgtatcgaacaggcaactttcgcgcatggtgtgatacatttctttgaagcgggacatgggaatagtgaagctcaacagattggcttcaaagtgaggacgcacggacggatcgaagaagccgaggaaacagcgcttaccgtctttttggttttcgagaacagtgagggttacaacggaactgcaaccggaaccgaaaggagtagctacggtatcgaatgcattcgtatcataaaaagcccatgtggtaagtcctgacaggatatcaggcgtagcaaggaacagcaaaccctctacgtgatcgaaagaagcaagtttatctattcgggcaaaatgcagataggccttttccgtacgcggtacctggatttgctttatgaaatctgttaccatttcaggagtctttttgtacttctctttcagggatacgaagttaggtacgtgtattggcatttccgtgaaacctgtgtagaactttccgccgccacatcctatgacgtcgctgttcagactgatggttttaccttcccttacctgttgcagccccttgaagaaacaaccgccaattttgtctgtttcgctttcctgtttatcggagtaccagaaggcgatgggaagttcggcacgttcaccaaatgcttcccgataattagtcataaaagtatgtatatccatgataatagagttttggtttggaagtaaagataacaattgattgccggattattgagtattttacttatttttgcatagaaaactataattccatattgattatgaaagcacgcatttcttgtttttttctacttgtttttttctttgtgcagatggtgaaaggagaagatgacactttgtggcaacttcatgcctctgatataaatgctccttatgtaggcgcccctatggcaaatggcggaatcggtattcttccctggaaagaacctttctcagtgcgacaggtgatactgaatcatgtgttcgatacggatggccctcagggggtaagccgcgtgttgaaaggaatcaatccttttctgatgtcgatggatgtagatggaaaagaggtgaatacggaatgtatcacaaactggaagcagtgtgttgatatgaaagaagcaactcataacagtagtttccgggcagccgggaaagttgatgtgggttatagcatttgcgctttaagaaatatgccttatgcggggcttatccgggtggagctgaaagctctgtccgatgtatccctgaaagttgctgcccggatggatattccccaagaatacagtcagccgacacagcgcttccggaaaatgagggcggatgatacacaaatgtatatgctgcaatcttatgctgtatctgctcatcggcaacaaaaagtttccgcttcttccgcttttatttttaataagggagcagcacaggagcctctttatgatgaagtgactaaagagatgtctttcgtgttgaatctgaagaaaggagagcagatgtcttttgctttggtgggttcggtatgctccgcccgtgactttagcgatccgtataatgaagctgaacggcaggtgatttatgctattcatgaaggtacaacttcgctgatggctgcacatcgtagtctttggaatgaattgtgggaaagcgatatcttgatagaaggggatgacgaagcacaacgggcggttcggtttgcacttttcaacctttattcttcttgcagggaaggaagcggattgagcatctcgcccatgggactttcttcacaaggttacaatggacatatattctgggattcggaactttggatgtttcccccgatgctgttgctgaataagggaattgccgaatctatgatcgattatcgtattgaccgcttgatggctgcccgcaagaaagcaatggcatacggtttcaagggagctatgtttccctgggagagtgatgattacggggaagaatcgactcctacttttgctttgacaggtcctttggaacatcatatcactgcggacatcagtattgcttgctggaattattattgccttactcgtgacggacagtggctacagacaaaagcatttccgctgatgaaagcggttgctgacttttgggtaagccgtgtgacgcgtaatgatgacggttcttactccatttgcaatgtagtgggagccgacgaatatgcaaatggggtggatgataatgctttcacgaacggtgcggctatccgggctttggaatatgcttgtgaggcggcaaggatatgtaatgagcctgttccggaaatatgggaagaagtgggtaagggcatccgtattcttcgttttaaagatggagtcactcgtgagcatgccacatacaacggtgagatgataaagcaggctgatgtgaatttattgggatatccattgtattttgtcggggatgctgaatcgcaaaagaaggatatggaatattatgtagataagattgatccgcagaatggtccggccatgtcttattccgtattctgtgtgcagtatgcccggatgggggatgcgaagcgtgcctatgagatgttttgccgttgctatcagccgaacttgcgtgctcctttcggtgtattggcggaaacgcccaccagtgataatccttactttatgacgggagcaggcggattgctgcaagctgttataaacggcttctgtggattgcagataacggatggcggtgtggagcaattatcttctatacttcctgcacattggaaaaaggttacggtgaaaggcgtaggaccggagaaaaagatgtatgtacgtgagaggtaggaaacgtacgggcataaaaaaaggagtaccgctgtactccaacctttgttaaccttaaatctaatactatgaaaaacacagtgcaaagatacggacatttgggataactgcaaattatccaaataaaaaagtatgttctataacattaattaaaaatatagacttgatcttatatctttgttaacctttagcctcctgatacataaaccgtttaatagattttttggctgtcttttcaaactcctcaaaatgtatcttcacctttgatatctgacaataagccggtaattgctggttgagttcgttacggttagcttccatcatacgctctacatccgtttgttgcagtccattggcaaatgcatcgtcaaagtccggataaatcagtgctaccagtttttctttttgcaacacaatgagcgactcggaaacgtaaggcatattattcagtttgctttcaatctcttccggatagatgttttgtccgctggaagtgagcaacatattcttactgcgcccgcgcacggttacataaccttccgcatccattgtgcctaaatcgcctgtatgcagccagccatttacgtcaatgatttgtgaggttgcttccgggttcttataatatcccagcatcaggttggtacctcgacaaatgatttctcccgccaccttttccggatcagacgaatcgatcttcacttccatgcgtgtggttgccttaccgcatgatgccagcttcagggtttcccagcggctggaacagatgataggaccacattccgtcataccataagcgatggtgtaggggaagcctatctgtttgagaaagcgctcgacttctgcattgaacggggctccaccaacgataatttcatcgaagttaccgccgaatatttccattgcttctttgcgtgcaagagctctgatcttgtcattgatgataggaagacgaagcagcaacttacctattttattatctacacggggcagaatattcttcttgataatcttttctacaatcagaggcacgcatgagatgacgcgtggtttgatttcagcgaaagactgtgcgatgattttaggggtcggcatgcgagtgaggaagtagaggtgtgccccggccgaaaaaccgtaaaggaaatcgtaagtcattccgaacacatgtcccataggaagcatggcaaccatattatcgcccggtttcacaggaagcatctcatggcagtaattcacgttggaccaaaggctccgataggggagcatgacacctttggaatatccggtagtaccggaggtatagttaatgatggcaagttcttccggtttatccttccgataacagatgtgttcgggacggaagtttttgggatagcgttgtccgtagagagtattgcggtgctcgaaagcttccatcaatcgtttgtctcgacagactacaggggtgaattcagtcatcagaataacgcccagcaattgcggcatggcgtcctcattcagattttcccacacttggtctcccacaaaaagcagtctggcttctgagtgattgacgatattatgtatattatccgctttaaattcgtgaaggataggcacaataacagctccataagtgatggttgccaggaaagtaactgcccagtgtgcactgttacgaccgcagacggcaattttatcacccggctggataccggcactttccagtacaatatggaattttgcaatcttgcgagccacgtctttatattggagagtagcacctttatagtcagtcaaggcgtttaagttccagttccgaatgatgctttgttcaatgtaatcaatgaagtgttgttcctgttccatctgttaaatttgcacactttagttaaaactgcgcaaatatagagctaaatgtgatgtcgtgcaagtttatatatttattctttggtgggaggcgaaagaaaaagaaaaaataaccaattgtactttcttttgccttgatgcaaaagaaagataccaaagaaaaattgcagaaagcccttacgttcggcatcctcaagcaagcttgcggctgctctcactaaaacgggcttttcaaggctgcacttccggggctactccgaaagtattttcagctaaagggcaggaactcgcttcgctcaaacagcctgcccttcttaacgccgaaaacactttctacgcttaacgcccctacagtgagaccgggagaccattcggtgtaaatgggggaatattgcgcagcactctaccgcgcagccttcgggcataggcgtaggtgcgtcaggcggagatattgtcaggcgcaggtaaggggcgatctgtttgagcgtagcgagttcgagccccgtctgcgcatggcagtatcggagtagcaccgtagacgtagcccgtgccctttctttttggtatctttttctttcgggcaaacgaaagaaaaagtacacacatattaatcactactcttcttatccgaaatcagcaacagcttatcccccaaatgtaatttcagcgatccgttcggtatcaggaattccgtgcctcgtttcacaatcattacgagtgctccattaggcagagtgatatccttcagggtatcgccttcttccagcatctccgtggtaacggtcatatcgctgagatcactatcaatttcttcgggcaattccacaccgaattcattacctgtcttctccaacggggtagaaagtttcagtaagcgggcagctaaagaaacggtagtaccctgaataacgagggaaacaatcgtgataaagaatacgatattgaaaatcacgtcagcacccggtacttgtgctactaccggataagtggcgaagatgataggcactgctccgcgcaaacctacccaggaaacgaagagccgcgaacggtttgttatcttcttgccgaaaggcagcaagcagaggaagacactgagcggacgaccgataacaatcataaatacaccgataagtgttgctactaaagcgatatcgagtaattcatgaggatttaccaacaaaccgaggcaaaggaacatgatgatttggaacagccaagtcaatccatccatgaaagtataaatctctttgcgatgcattatcttgttgttacctaccatgatgccggcaatgtaaacggcgaggtagccatttcctttcagaagatcggtaatggagaaagtgaaaaatacgaatgcaagcaaaagaataggatagagggcttgattatcaatattaagtctgttcagcatgaggatggcaagtttgccaagaagatatccggctgctgcacctactataaactgtacaacaaatgaaccgaagatacctgcaatacccattccaccggattgtatgaactgtatcagtacgatggtaagcatgtaagccatggggtcattactaccactttcgagttccagcatgggacgaaggttatgtttcagattcatcttctgcgaacgcagaatagcgaatactgaagcggaatcggtagaagacatcgtagaagcaagaagcagagaagtagtgatgggcaggtaaatgtttgaccaactcatgccggagatccaccagatgaataaacccgtaaaaatagctgtaagtaatacaccggccgtagaaaggacaatacctggaacaagaatcggcttaatttcgctgaatttagtatccataccgccagaaaacaaaataacgctaagagcaaccataccaataaattgtgcttctttagcgttatgaaactgtagtccgaaaccatcgctaccgaaaaccatgccgacgacaaggaatagtaacagggcagggactccgaatcgatagccggtcttgccaacaataatactaatgaaaagtaagatagaaccaattaaaagaatgttttctgctgtaaaaatcataaattgggtattatttaagttgtttattcaaggatttagttatcgcaaagcgaagttatgtctatttttaaacaaatgcaaggtgtaaaatgttcagattgaattttactttcttttcatataatccttcattacaaattttcttaattgaattttagtacaaacatggtttcctttccgggatgcagggaaaggctaccacctgacaggcgcattatttgacgtgaaatgctcaatccgatgccgctgccaccttcttttgtggtgaagaaaggtatgaaaatgtgttctgctacttcaggaggaatggcaggaccgttattggatacttcgatgagtacggcttcattttcattacaataagcgtgtaaggtgatgataccttcttgaattcctgctgcctcgatggcctgaatggcatttttcaataagttgatgagtacctgtgagataaggttctcatctgcataaagaataaggtcatctggagtgatgtgggagtggaaggtgatatgggaatcaggatattgatgccgtgccagttccaccatacgattgataaaacctttgacgtagaacaaggaaggttccggtttggggatacgggtgaaacggcggtaattttctacaaaagagagaagtcctttgcccgtagtgctgatggtgtgcaggccattgcggatttcgtcagcagtttctttatcggaagagatagattcactttttgcttttaattcttcgcttccttgtatcagtgtcagcaatgtatcactcagtgaagtaatgggagtgacggaattcataatttcatgtgtcagtacatgggttaggcgtatccaggagtcgatttccttttcgtccagttcgttattgatatcattcagggcaaggatgcggaaatgttcctgacggatggttatgtcggagacgcggattgagaggttgactgtgccgcgttcgttggacaggcgggtttgcaacttgtctccggggcggcaatgggcgaaaagtcccataagatttgcatcgatacggctaagttggctgacatgggtgaagacttccagccctaacaggcggagggcttcattatttttctggtaaacagcacctgcatcgttcagtaccaggataccggtattgatgcagtcgagaatgagttcgtaatacttttcctgttgtgccgtttcgctctttacattatataatatagaagcaacacggttcagggcttggtttacaatatggttgtccggaatatcttcgtgttcggagaaatggatggatgcatcgttgttttcaatggcatcgagcagaaacagaaccttctgtgtatgccggcgatacagtttccattgccagcgcagactcgttaacagcagcaaggaagagatgacgctccatagaaggtctttataaataatggataccgtgacagctcccgccaacaggagagagatgacgatacggaaaaggtagcggtcggtgatgtatcggtagtaatgtttcataatccgaactttttcattttgttatagagagtctgccgggtgatgccgagttgtgcggcaacagcggatagattgccgttacaggtgtccagagctttttgtatcattttccgttccatttcttcaagggtggctgcttctgtaccggcatcgcttccggtgcgtgaggtttcgggacgcttaggcaactggaacagttccaccggcagttcgttgccgtcgcaaataatgactgctttctctatggcatgctccagttcacggatatttccataccagggatgtgttttcaatttgatacaggcagcatcggaaagccgtaataatgctttgtcatattgcttgcagaagcgtgttataaagcgttcggcaagaggaagaatgtcttccggccgttcgcgcaaaggcggaatttcaagatggatagtattgatgcggtaaagcaagtcttcacggaattcattgcgttgtaccatctcgttcaggttgcggttggtggcacaaatcagacggatgtcaacagctataggcaggttgctgcctacacggacaatactgcggcgttgcaatacggtcagtagtttggcttgcaggtgatagggtaaattgccgatttcatcgagaaacagtgtgctatggtctgctgtttcgaacttaccgggacggtcagcgtatgcatctgtgaaagagccttttgtatgtccgaaaagctcgctttcaaagaggctttcggtgatggctcccatgtctacggcaaccatttccttcgtacggcgggaagaaagtgcatgaatttcacgtgccagcatctcttttcccgtaccgttttctccggtgataaggatatttgcatcggttatggcgactttctccaccagcgagcgcaattgctgcatgatgggactttctccccaatacatggcagaggttacaggagaggcattttttccgttattcttattatgaatggcttgggctgcattcagtaaggtttccaccagcttttgattatcccatggcttgacaataaagtccgtcgccccttcttttatgccacgcacggcaagatcaatatctccataggcagtgaaaagaaccacaggcaaggagggacgaaggcgtttgatctcctgcaaccagaataatccttcgtttccggtattgatgcctgatgtaaagttcatgtcaagtaacaccaccgatggagtttcttcacgcaacacagaggtaagtgtgacaggtgaagtgagcgtgatgatcttttcgaaatggggtttcaacagcagttgcacagcggtgagcacaccgcggttatcatcgacaatgaggatatttccgggctttttcatatgagagtttcttttgaggggtaaagataaggaagttcagcgaaaaaaatgaaagatacttgtcatattttctacatatcggcgtaatacgaataactgacctttgcctgcaactaaaaatacagacactatgagattacgtactttttattctaccattgtgttgtctgatatccatttgggtacctctcactcaaaaactgttgaagtaagcaacttcctgaaatccgtcaactgccggcgattgatactgaatggtgacattatcgacggctgggccttgagcaaaggcggcacctggaagtggcaggcaaagcatacggatttcttcaaagttatcatgaagatgatggaaaagcagggaacagaagtgatctatgttcgtggcaaccacgatgatttcctggatgggttggcaccgatgacattctataatataaagattgtgagggattttattcacgagagtcatggccggcgttattttgtgacgcatggagatatttttgatactgtcactacacggatgaagtggctggcacagttgggagatgtgggatatacgtttctattatggctgaaccgtatttataatgtgtatcgtgcccggcgtggacaaccttattattctttgtcacaagcgattaaacaaaaagtaaaatccgctgtttcttatatttccgattttgaggaggaattggtgaagtttgcccgtacacgtaaatgcgacggtatcatttgtgggcacattcatcattcggcaaatacttattatgatgatatacattatcttaactccggtgactgggtggaaactctttcggcactcgtagaggatgaggaggggaattgggaagtgttacggtatgaggatatgctgatgaacgaaaagcctgaagagcgcttctgtagttaaaatcgtgaattataaatcgtaaattactaaattataaatataaagatgaaagttctttttattgttcaaggagaaggccgcggtcatctgacgcaagccatcacgctggaagaaatactacgacgcaacgggcacgaggtagtagaagtactggtggggaagagtaatactcgtcgcctgccgggtttcttcaaccgcagcatacaggcacctgtgaaacgctttctcagtccgaactttctgcctacacctgccaataagcgggtcagtatgtctcgcagtatcgcatataatctgatgcaggttcctgcttatctgcgtagcatctgttatattcaccggcgtatccatgaaactgatgcggatctcgtaatcaacttttatgagttgttgacgggcttgacttatctctttttccgtccctcggtaccgcagatcagcgtcggtcatcaatatcttttcctgcatcatgactttgagtttccccaaaagaatcccgtgagcctgctgatgctccgtttttttacgcgactcacgtgtatcggagctaaagagaagctggctctctcattccgtccgatggaaacggacgaagaagcacatatacgtgtggtaccgcctttgctgcggcgcgaagtgctttgttgtgaagctgcttccggagagtatgtacatggctatatggttaatgccggatttggagaaagtatctcccagtggcatgagcaacaccctgaagtgcctttgcacttcttctgggacaaaccggatgagccggaagtatgcaggatggatgaaacattgtcatttcatcagttggatgacgaaaaattccttcgatatatgtcgggttgccgggcgtatgccactacggcaggttttgaatctgtttgtgaggctatgtatctgggtaagcctttactgatggtgccggcgcacatcgaacaggattgtaacgcttatgatgcggcacgaggcggagcaggtattatttctgataattttgaggtagaccgtttgttggagttcgctaggagtgagtatcaacccgaagagaatttccgtagctgggtgcgcagttgtgagtggcggttgctgaactgtatagaaacagcggaaggaataggctttgtaaatgattataaattgatatatgaataagaaaatagcctgtatggaggctgtaatttaaactgtgtcagcaaagcaaacaaaaaaagtattaactttgctaacacagtttttttatgagtgaagaatttgattttgaaaggatcaagaacaaggcaatcgagcagctcaaggctggcaagcccttgttgggtaaggacggagcttttgccccgttattggagagcattttaaatgcagccttagaaggtgagatggatgcccatctttccgaggatgaacgcatgagtggcaaccgtcgtaatggcaagatgcagaagcaggtgcaaacttctatgggtgaggtgaccgtttctacaccccgtgatcgtaattccagcttcgatcctcagtttataaagaagcgggagaccattcttgcggaaggtgttgctgaccgcataatcggcctttatgcccttggtaatagtacacgtgaaataagcgactggatggaagagaatcttggtaaccgtgtgtctgccgaaacaatcagttccatcactgaccgggtacttccggaaataaaagcgtggcgttcgcgtagcctggactatatttatccgatagtttggatggatgccattcattataaagtcatggatgagagaggctgtgccattacccgtgcaatctacaacgtattggctatagataaggacggtcgtaaggatttgcttgggatgtacatctctaagaatgagggggcaaacttctggttgaatgtgctgaccgatttacagaaccgtggtgtacacgacattctcatagcttgtgtcgatggtctgaagggcttcccggatgccatccaaagcgtattccctgataccatagtgcaactttgtatcgtccatcagatacgtaactccatcaaatatgtcggcagtaaacaccagaaggagtttcttaaagatctgaaacgggtttacggtgcagtcagcaaggatgccgctgaaacggagcttcttgatttagatcagaaatggggagagaaatatcctatcgtcatcaagtcgtggcaggacaactgggaaaagctcactgaatacttccagttcacatccgatatacgtcgtatgatttatacgacgaataccgttgaaggctaccaccggcaaatacggaaagttacaaaaaacaagggcgtgttccctaatgacaccgcccttgagaagcttgtctacctcgcttatcgcaacatacgcaagaaatggactatgccactggctaattggggcacaattgcccaacaactggcgataaagtttggagatagatttaagttgttgtaattttacgctcgtcgggagtgctggtgcacccccttggcgctggccgatccccgaccgatgagcttgaaagaaaaacagcgcatgacacagtttactttacgccccccctgtatgaaaataaagaaggggaaaattaacttccccctctcttttcttttgcttttgctgccgcttgggtagcggtggtttctgtttcttctgtttgctcttcggtgttcttttccgcttctttttgttccatttcccgtctcagtcttttcaacctccacttattccagaacataagctctttccatcggttgaaatccttcttgaaaatgataccgatgccttgcgttgtcagattggtccttgtataatagcggtcgttcgtctcattatacgctttcaggcgaatatctccgctacggttcacaagccattctgcttcaaagtctcctacaaagttcgtatttgccatcggattgtctcggtatccgaagttaccattgataagcaaacgattgttcagtaattgccccgatagcattccttcgaattccatatccgtccagcctttttctccagtgctgaggttggtacctatattccagttgttactattaataatgttggaaagtgcattatttagttgtcccgaaagggtggatgaaagcacagaagtcatcatattcgagttttgtgtggcatctacattttcgggtgtatagaatttgccgatacctaacagatagaggatctgcatattcatttgttcgtccgttgaaatgtagttacggataagggcttgcacttcatcccgttcattaggcacttccagacttaatttgatgtccggagaagttagttgccccgtcaggttcatgatacagtttacacggatactcgttggaattccgtagttgcttacattcggcaccaagtcattcaaggatgcggaattcaccatataacttgcttggatatccatggtggcatccaacggaggaccgttgaaactgatagtgcttccatctttgatggtaaagtccttgcgtattacctcttgcaggctgaatttataaactccctggctgatacgataattaccgaacatcttcacatcgtcggccttgttataaaattccgtacggatatttccggatcctcgtccactgatgtaatcaccggcgatggggtccatcactatcttcatgcttgcatccggtgtagcttctacgagcaggttcaggcggatatccgtgtcactttcttcctcctgctgtatctcttgttgcgccagttcatagtcggaaatcagattgatagaatccagcacagcccggcgcggtgtcttatccacgaatttgatgaattggttgctggcggctgaagatacattatcctttatatatacgaagttggtattccggttggtcgtcatggctacatcgatattgactccatcccttgcgttacctgctatcagggcattccccgttccgtataccgttccataaaaaggaaaatccagtgactccttcgtattcattaccagcatgttgttcactccaaactggaaacggtattccaggttcttgaaatgctcataatgcagataaccgtctacatgcccttgattgccttgtgtatcgaatatccggttatcttggaaagtcagtccattcggttctatgcgaatactgtcttttataaagaaagtggtattcagtacgtctaccttcatggaggcattgccaagtacgcgcccttccatggtgagccctttgaatttgccatagaaatgtacgtgaccgctggcacgtccgttaaattcaggtgtgatactactcatgtagtgttctatgaatttcagattggtgttgtcagcttcaatctgtaagtcaagcgcacttttaggttttatgggatatatgtagccatatacatgacttttagctgtatctttttcatggatatgggcatcgagatagataccttctacttcctgatgccattctccgtgaatgttggcatcgcccaataaaccgtcatttagtccaaggtcccggatgaaaaggtcagtatacataacaggcttctccaatactccgctggcataggcaggaccagtagcttctcctttaaaattaactccaaggtcggcaatatcaaatacgtagcctatattgatatcttttaaatccaggcgtaccgtatcctgaggttgttttgagatagttccgttgatgcgcaggtatcggtctttatggctgaaataaaagtcgtctatatatatctttccggagtcgattaccacttttgacggatgtatttcccataaagtgtcattcaggataatatccgttttttgaacatcgacgacggttttcaaagccggaatactcttgtttgagcgggaacgctttttgttctgatcctcagcttgtgtgcggatgaaatgtgtagcagcagctaatttgccactatatgtgacagcgctactgtttccccaattcagagaggtctgaataaggtcatctttggcttgtgcgtctaacgatacgttgatggaaccttccggtttgcgattactgaatcgtacacgtgcatgaaatttatcaccgggattctcacacaagatcatacccgattcaaggaacttgtctccatagcgcagacgcgggaaatatccttctactcgcaggcgctgtgctttgtcattaaagtatccttttagggtagaatgtgtatagaccttaaccggaatattaaagatggtggagaataaatccgtattaaagatatttatgtcgaaatggaagttattctcactttctatgttttttttgtccggcaatattagagcaggaatatatcttcgcatgatgttcagtacactggcgggtagtgtgcgataggaataatctccttcaatacttgcattcaggaaattagaggttatttttaattgtttatgcgattcgtcttcctgagtggcggttatttttaagttgtccagaaaatagtttctatcgggtgctgtgaattgcaggctgtcaatattgatctctccattcatttcatcgatggaaccaccggtgaaatcagccgttaactgaacagagactgccgtatcttcatatttaggtgtcaggtgaagctcgtgggggcgtacattacggatattggcatggaaattaaaagtcggtacacgactggctgtattaatgctaccatttagcagaacagaaccgttttcgtcatccaatgctatctctccgttgaaaccgccttgtttatattctccgtcgagtgtgatgttctcatagttataatcactatagtcgatggaagcgattaatcccttcattactatggaaggatattgcttttcgtagtggctgccttcgactttgagattgaatgtgacctttcctaaccggtcgtttgccagcatattgcctaactcaaactcttcagtctttactgcacccgaataagaaaaataacctttttctttatttgaacttaattttaagtcggtcttgatagaacctatatcggtacgcaccaggccataagttacaatatctgtgaaatatcccgagacttccccattaaacgagatggtgcctaagcgttgcagtaccggaggaacaccttcgtagtttttacttaaattgcgaacgaaaaatgcaatgccttccggatcagcatataaactggaaaggttgccgaatacgaatgcatcctcaggatgcgacaggtcttgcaaggaaacatctccccttaaatgaaaatgctggtttcctgtaattgacagatgaggacaattcaactgattgatagtaccgttagcttccaaagccacttgcaaattttccttgaaaggggaaaaggccggaacaaagggggcgaggtcacaaagagtaatgtccgaaggaaatatccgcaaggaaaagcgtacatcattggtaaagtttctaaaagctcccaagctgtcatattccatatggatggtatccattgcaagcgaagtattcggcaaatcaatcgcgaagttctcaatgctcatcttctgattgtttgctacaatcttgaaacttagtttttttaactcaaaaccggaattttcttcttcaatgcttaggcgcttcacagctgcattgacagagtcattttggagcgctttcaacgagatattggcgatgatgtttcgtagctgtatatgttgtgcattgaattttccgggtgtctcttctgccgacaatacgttataagacatcttaccgcgtcgtatcagcaacgagttgatacgtatgtccagattactttcctttttgatggtatctttagaggcaaatgcattgagtacgaactggaagttaggaatgtcttctggtgtctttttttccaggttgatgttgaagccgaataactgtacgttactgatcgatactttgcccttgaacaagggaagtatatcgaattttgcagaaaggcgggctacttttagcatttccttgcctgactggtcgtttaacaataagtcgtcaataataatgcggttcagtagtcccatattgatccgcccgatggttagttgtgtacctagtacattagccagttcgttcgcaacgagcacagatatttgtcgctgaacgtaaggaatgttcaacaataatatagtcccgatatacaaactaagtataataccgagcacccagcgaactgtcttctttaactttctgataggcggtttgtttgaattagccaacaaaaatatgaaataatacgttatcaatcctacttttatcactacttttgcagcgtttaaacgtaaataacgatatgagtacaataattttaggaatagaaagctcttgtgacgacacctctgctgccgtcatcaaagatgggtatctgttatcgaatgtcgtttccagtcaggcggtgcatgaggcctatggcggtgtggttcccgaattagcttcacgtgcacatcagcaaaacatcgttccagtggttcatgaagcattaaaacgtgccggagtaactaaagaagaattgagtgcggtggcgtttacaagaggaccggggttgatgggttctttgttggtgggcgtgtcgtttgccaaaggttttgcccgttccttaggtgctccaatgattgatgttaatcacttgactggacatgtgttagctcattttattaaagcagaaggtgaggatactattcaacctgaatttcctttcctttgcttgcttgtatcagggggaaattcacagattatcctggtaaaggcatacaatgacatggagattttgggccagacaattgatgatgctgcaggggaagctattgataaatgttcgaaagtgatggggctgggatatcccggtggtccgattattgataaactggctcgccagggaaatccgaaggcttttactttcagtaaacctcatattcccggattagattatagtttcagtggtttgaaaacctcatttttgtattctttgcgtgattggatgaaggaagatcctgatttcatcgaacatcataaggttgatctggctgcttcacttgaagctactgttgtagatattctgatggacaaacttcgtaaggctgcaaaggaatataagattaagcaagtagccgtggctggtggggtttctgctaataacggcctgcgtaatgctttccgtgaacatgctgaaaagtatggatggaggatatttatccctaaattcagctatacaacggataatgctgccatgattgccattactggttattttaaatatcaggataaggatttctgttcgatagatgcgccggcttattcgcgtgtcacattgaagtgaaaggagttttagaacatttctttgtccgcaccgcacccggtccgtgtctgggccgtacctgctccgtatctgctccaaagctatagatacggagcaaatacggtccggacacggttcgggtaatatcagtaggaaaaatagaacaaaaatataaattatatataataaggtatatgaaactggaagaagaagtcggtgaattactaaaatcgaagaatttatccctttccaccgcagaaagttgtacaggaggaggtgttgctgctttagtgacttctgttccgggaagttcggaatacttcaatgggggaattgtggcttattccaatgaggtaaagatatctctgcttcatgtttctgctgaaacattggaaaggtatggagccgtcagtcaggaaacagtgattgaaatggtgaaaggtgcgatgaaagcattgaaaacggattgtgctgttgccacatccgggattgccggtccgggaggaggtacatccgaaaaacctgtcggaacagtgtggattgcggctgcctataaaaatgaaattgtaactttcaaacaagagggggatgacggaagaaccaggaatgtgcaaaatgctattcagaatgctttaaagatgctccgtacatgcttaaaatgaagaaaaaatgctatcagacagtgaattattttatgaaaaacttgtttggtatcgataaaagtacttactttgcgctctgtttgaaataagtatagataaaaactataaaaataagatagaaatgtcgaagatttgtcaaattaccggaaagaaagccatgattggcaacaatgtttcacactcaaagagaagaactaagagaacctttgatttgaacttgtttaacaaaaagttctactatgtagagcaagattgctggatcagccttagcatttgtgctaacggtctgcgtattattaataagaaaggactggacgctgctttgaacgatgcagtagcaaaaggttattgtgattggaaaagcattaaagtaattggctaaaagtagaggagaatactgattatggcaaagaaagcaaaaggtaacagagtacaggtgattctggaatgcacagaacacaaagatagtggtatgccgggaacttctcgttatatcactacaaaaaacagaaagaatacaactgaaagattggaattgaagaaatacaacccgatcctgaagagagtaacagtacataaagaaattaaataataaggtataacccatggcaaagaaaactgtagcaagtttgcacgaaggttctaaagaaggtcgtgcttatacaaaggttatcaagatggttaagtcacccaaaactggtgcttacacttttgatgaacagatggtattgaacgaaaaagtgcaagactttttcaagaaataagatagtctgtcgaaagacgtttgaatatagaatcctcttatcgtattccgataaggggattttttttgtactttatccctgtactttcattactttgttatatctttgtggcataatgtattgtattaatagatagagtatgggattttttagttttttctcaaaagataaaaaggaaacattagataaaggattatctaagacaaaggaaagtgtgttcggaaaaattgcccgtgttgtggcaggaaagtcgaaagtggatgatgaagtgcttgataatctggaagaggtgttgataacatcggatgtaggtgtggaaacgacattgaatattattcaacgtatagagaaacgcgctgcgtcagagaaatatatgaatgcgcaagaattgaacaccattttgcgcgatgaaatcgctgccttattgacggaaaataattcagatgatgtggatgactttgaagctccgattgagaagaaaccttacgttattatggtagtgggagtgaatggagtcggtaaaacgactactattggtaaattggcttatcaatttaaaaaagctggtaaaagtgtttatctgggtgctgcagatactttccgtgcggcagctgtcgaacaattggatatttgggggagtcgggtaggagtacctgtaatcaaacaaaaaatgggcgctgatccagcttctgtggcttatgatactttgaattctgctgttgctaataatgccgatgtggtaatcattgatactgccggacgtcttcataataaagttggcttgatgaacgagttgactaagattaagaatgtaatgaagaaagtggctcctgatgctcctaatgaggttttgctggttttggacggttccaccgggcaaaatgcatttgagcaggctaaacagttcacattggctacggaagtgactgcgatggctattactaaattagatggcactgcgaaagggggagttgttattggcatttccgatcagttcaaaataccggtaaaatacattggtctgggtgaaggtatggaagatctgcaggtgttccgtaagaaagaatttgttgattcgttgtttggagagaatgcatgaagcggaaaaccattgatattataacgttaggatgttctaaaaacctagtggactcggagcatttgatgcggcaattagaagaagctggatatcatgtgactcatgatacggaaaagcctgagggagaaattgcagtgatcaatacttgtggtttcatcggtgatgcaaaggaagagtccatcaatatgattttggaatttgcacaggcaaaggaagaaggggatttagaaaaattatatgtaatgggatgtctttcggagcgttatctgaaagaattagctatcgaaattccacaagtagataaattttatggtaaatttaactgggtggagttgttgcaggatcttggtaaggcatatcacgaagagcttcatatagaacgtacacttaccactcctaggcactacgcatatctgaaaatatcagaaggttgtgatcggaagtgttcgtattgtgctattcctattattacaggaaaacatgtctcacgtccgatagaagagatcttggatgaagttcgttatttggtaagtaagggagtgaaagagtttcaggttattgctcaggaattgacatattatggagtggatttatataagaagcaaatgctccccgaattaatagaacgtatttctgaagtccctggtgtggagtggattcggctgcattatgcttatccggcacattttcctatggatttattccgagtcatgcgtgagcgtcctaatgtgtgcaggtatatggatatcgcccttcagcatatcagtaatccgatgctggagaagatgcggcgacatgtgactcaggaagaaacctatcatctgatagagcaattccgcaaagaagtaccgggtattcatctgcgcactactttgatggtaggacatccgggagaaacggaagctgattttgaggaattaaaagagtttattcgtaaggctcgtttcgatagaatgggggcttttacttattccgaagaagaaggtacttatgctgctgcacactatgaggatgaaattcctcaggaagtgaaacaagcacgcctggatgagttgatgtcaattcagcaagggatttcggcagaacagagtgcagcaaaggtcggtcaatgccttaaagtaattatcgatcgtttggaaggagattattatattggccgtacggaatttgattccccagaagtagatccggaagttctgatagaacagggtaaacagaaattgcttattggtaacttttaccaggtagagattataaattccgatgatttcgatctttttggacgagttatttaaataattttcctgaagaatttgtgtatgtgcggaagttttgctaatatagcaccgaactttataaaaatagctggattttgaataataaagaatttacttcagaattgtcacgaagattgggatataccataaaggacacatccgaactgattgcatctttgctgtcggatatgacgcaacagttgcaagaaggaaatgccatttctgtacaaagtttcggtacgttcgaggtaaagaagaaagcggagcgtatcactatcaatcctacaaccaaattacgcatgttggttccacctaaattagtattaacatacagacccagcacggctctgaaagataagtttaagtaatcttcttttactcaagtaatcttccataaatatgaatgagaagctgaatatacagaatttaatagaattgctcgcagaaaaacatggcatggataaggcggatgccgagagcttcgtgaaagagttttttcagttgattgaagaatcgctggagaatgataagtatgtaaagattagaggcttgggcacatttaaactgattgatgtagagagtcgtgagagcgtaaatataaatacaggggaacgatttgaaatacaggggcatacaaaagtttcatttgctccggaacctgccttgaaggacttgataaacaagcctttttctcactttgagactgtggtattgaatgatgaaaccgtgttagaagatacacaggtggaggataattccgaagaggaggaaaaagaggaggtgcttgtggaatcagaaaagtctgtcgttaatacagaagtggcagatgttgtttcagaggaaactatagagactgtagaaaaatcaatagaagtatcagctgaaactgtagaggagcctgtggaagtagtagaagtaccaactgagatcattgaggaaactgctgaaattgttaaagaagaatctgtagtagtagctgaggaacatattcaggtagttgaagaagtaatagaaactacagaacaacttgttcaggatgaagaaattcaggttgatcaggcggaacctgtcattcagattgaagagtcagaacagtttgtagaggcacctgtcgttctatctggagaagtaaaacagtctgtaacagaggcaactactccggtgaatgagtgcgtagaagaatctctgacagaacaaaagaatcaagaagatttggtgcctacttatgaagttcctgaacctccatcacctcctgtgaatagagcagatagttctacgatgaagtttttcattggaatcgtaatacttgttgtattattatgtgtaggtgctgttacttttatgtattatccggatttatttgacagaatatctccaccgccaacagagaaagttgctgatgaaaagatagagaaaccagccgttccgctcgctctgacggatagtattgttcgaaaagataccacaactgtggttgcgaagaaagatactgtggcagaagttgttactcctaaagttgttgaagagccgaagccggttgcaaaacaggagactcctgctactactcctaaaaaagagacaaagaaagctgctgcaactccttttgagccagactctgtaaattataagattgtaggtacgaaagctactcatactatccaggaaggagaaactctgacaaaggttgcacttcgcttttacgggactaaggccctgtggccctatattgtgaagtataattcgggtgttataaagaatcccgatcatgtgccgtatggtactgtaatcaagataccggagctcgaaaagaaataaaagaaaatattgcacccctgcaagttgataatacttcacttgcaggggtgatttgctatttattcctgtctgcgaatttgaaattcttttcagaaactattgttaactactaaactctatgaaagtagtttaatctaattgttttttaataaaaattagttggtatggttaatttattcctgtacttttgggagcgaaaaaaataattaccagtagcatactggagaaatcaatggaatttaaacaataaaaataatagtatttatggctgaaacaattgatatccgcgaactgaacgagcggattgaaagacaaagttcttttgttaccaaccttactgctggtatggaccagatcatcgtaggacaaaaacatctggtagagtcattgttaatcggtttgctgtctgatggacacgtattattagaaggtgtgcccggtttggcaaagacattggcgattaagacgcttgcctcactgatcgatgcacaatacagtcgtgtacagtttactcccgatttgctgcctgctgacgttatcggtacaatggtttacagtcagaaagacgaaacgttccaagtaaagaaaggacctgtttttgccaacttcgttttggcagatgaaattaaccgtgctccggccaaggtacagagtgctttgctggaagcgatgcaggaacgtcaggtaactattggtacggaaacattcccgttgcccgaacctttccttgtacttgctacacagaatcctattgagcaggaaggtacttatccgctgcctgaagcccaggtggaccgtttcatgctgaaagtggttatcgactatccgaagatggaagaagaaaaaatgattatccgccagaatatcaatggcgataaattcaatgtgaagcctattctgaaagctcaggagattattgaagcacgtaaagttgttcgtcaggtatatctggatgagaagattgaacgctatattgttgatattgtatttgctacccgttatccggagaaatatgatctgaaggaactgaaagatatgattggtttcggtggttctccccgtgcctctatcaatttggcattggctgcccgtacttatgctttcatcaaacgccgtggttatgtgattcctgaagatgttcgtgctgtggctcatgacgtattgcgtcatcgtatcggattgacttatgaagcagaggccagcaacctgacttctgacgagatcatcagcaaaatactgaataaggttgaagtaccttaattaagtaagcatttttaaaaaggtcttccgagacctgttaataaatggtgtgaacgtttttaaagaatcttgccaacgtttttaaagaacgttgccggtatttattaacggaattatttaacgatatagatggaaacaagtgaactgttaaaaaaagtccgtcagattgaaatcaagacgcgcggattatccaacaatatctttgccggccagtatcattcggccttcaagggtagggggatggcattttcagaggtgcgcgaatatcagtttggcgatgacatacgcgacattgactggaacgtgaccgctcgcttcaataagccttacgtgaaggtgttcgaagaagagcgcgagctgaccgttatgttgctggtggatgtttccggtagtttggaattcggtacagtgaagcagatgaaaaaggatatggtgacggaaatagctgcaacgttggctttttcggctatacaaaacaacgacaaaatcggggttatctttttctctgaccggatagagaaatttattccgcctaagaaagggcgtaagcatatcttatatattattcgcgaactgattgactttaaagcggagagtcggagaactgacatccggctcggactggaatatctgacaaacgtaatgaagcgtcgttgtacagccttcctgttatccgatttcattgatcaggggaactttaagaatgcaatgactatcgccaaccggaaacatgatatggtggctatccaggtgtatgaccgcagggtagaggaactgccggctatcggtttgatgaaaataaaggatgctgagaccggacatgagcagtggattgatacttcgtcgcgtgctgttcgtcgtgctcatcacgactggtgggtgaataaacaggtggaactgaacgaaacattcactaaaagtaatgtcgataatgtgtcggtacgcaccgatcaggactatgtcaaagcattgatgaatttgtttgcgaaacgaaattaatcggaaaaatgaaaagatatctatttctgataaccctattggggatgttgactggcaaggcagtggctcagtcggtaacagtggatgctaccattgactctctgcaaatttatatcggtgaccaggcgaagattaaacttcaggtagccttggatgccgataaacgggctattttccctgtttatacggatacgctggtaagtggtgtggagattatagatgttgcaaagccggatacgcagtatataaatgatgataaacgaatgctgattacgcaggagtatactgttacatcatttgactcggcattgtattatctgccaccgatggaagtattggtggataataaggcatatcgttcgaaggcattggcactgaaggtatattcgatgaatgtgccattggatcctgagaatccggaacagttttttggtccgaagacagtaatgcaacctccttttgtgtgggaagattggtatgggattatcacctgtggcatattgcttattccgattgcattattacttatctatctgatcatgcgtatctgtgacaataaacctatcatccgtaaggtaaaggttgaaccgaagttacctccgcatcagatggcgatgagagaaatagagcgtatcaaaggggaaaaagtatggcaaaagggacagccgaaggagtattacacggaattgacagatactttgcgtacgtatattaaagagcgttttggtttcaatgctttggaaatgacctcttcggagattatagaaaagctgcttgaaatgcaagataaagaagctattgcagatttacgttctctttttgagactgccgatttggtgaagttcgctaaacataatccgttgatgaacgaaaatgatgcgaatctgatcaatgctatcgaatttatcaatgaaaccaaggagaaagaagtggagaatgcaaaaccacaacccactgaaattaccatcattgagaaacgttcattgcgtactaaaatattgctgggcataggcatcgtagtattgtcggttgccttgattggttcgttcgtttatattggaatgcagttatacaattattttgcgtagtagcagaatttaagggtaactccaatcttaaattgtaaattgttaaatagtaaatacaatggtttttgccaatattgaatatttgtttttgctgctgttgcttataccttatatagtatggtatatcatgaagcggaggaataatgaagctacacttcagatttcggatgctcgtgtatatgctcatacaccgaagagttataagaactatttgttgcatgtgccttttatgttacggattattgccttggcattgattatcgtagtgttggcgcgtcctcaaactactaatagctggcaaaacagtgaaattgaaggtatagatattatgatggccatcgacgtatctaccagtatgctggcagaggatttgaaaccgaatcgtctggaagctgctaaagatgtggctgcggagtttatcaatggtcggcccaatgataatatcggtataactttatttgccggtgaaagttttacgcaatgtccgttgacggtggatcatgcagtgcttctgaatctgtttcaaggcattaagtgtggtattattgaagatggaacagcagtcggtatgggtattgctaatgccgttacccgcttgaaagacagtaaagcgaagtctaaagtaatcattctgttgacggatggtacaaataataaaggagatatatctccgctgactgcggcggaaatagctaagagttttggtatccgggtttatacaattggtgtaggtacaaacggaatggctccgtatccttatccggtgggtaacactgtgcagtatgtcaatatgccggtggagattgatgaaaagacactgacgcagattgcggctaccacagaaggtaattatttccgtgctaccagtaattctaagctgaaagaggtatatgaggagattgataagttggagaaaaccaagttgaatgtgaaggaatacagcaagcgccaggaagaataccgttggtttgctttggcggcatttttgtgcgtgttacttgaagtattgcttcgtaattctatcttgaagaagataccttaaaacaatgcattaattgtaaattactaaattgtacatagaaagatgtttcgatttgaagaacctacatatttatacctgttgctcctgttgcctttcctggcggctttctacctgtactccaattatcggagacggaaagcgatccgtaagtttggcgatccggtgctaatggcacagttgatgccggatgtatctaaatatcgtccggatgtgaagttttggctggtgtttgctgcaatcggactgtttgctgtattgctggcacgtccgcagtttggctctaagttggagactgtgaaacgtcagggagtagaggtaatgattgcgttggatatttctaactctatgttggcacaagatgtacaacccagtcgtctggagaaagccaagagactggtagcacaattggttgacaagatggagaatgataaggtaggtatgattgtgtttgctggtgatgcctttacacagttgcctattacaagcgattatatttctgccaagatgtttttggaatctattaatccgtcattgatatccaagcagggtacggctatcggtgcagctattaatctggctacccgcagttttacaccccaggaaggagtagggcgtgccgtcatcgttattactgacggtgaaaaccatgaaggcggagctgtggaagcggccaaggctgctgcggaaaaaggtattcaagtcagtgttctgggtgtgggtatgcctgatggtgcacctatccccgtagaaggaaccaatgacttccgtcgtgaccgtgacggaaacgtggttgtaacccgcttgaatgagcagatgtgtcaggaaatagctcaggcaggagatggaatttatgtgcgtgtagacaactcaaatgctgcacaaaaggtgattgctcaggagattaataaaatggcgaaagcggatgtggaaacacaggtttatacagagttcaacgaacaattccaggctgttgcatggattatattgttactgttgttggctgaaatgctgattttggaacgtaaaaacccgttattccgtaatatccatctgtttaaaaaggaagaaaggtatgatgatgagaaatagaactatcggaattatcttgctgctactgacggctatttcagtttctgcacagaaagcggaacgcgactatattcgtaagggaaaccgtgcttataaagatagtacgtacgtaaatgctgaagtgaattatcggaaagctattgatgtgaatccgaagtcagcgatatccatgtataatctgggtaatacgcttatgcaacagaataagttgcaggaggctatggagcagtttgttgctgccactaaaatggagaaagataagggtaatcttgctcaaatctatcataatatgggagtaatattccactccggtaaggattatgccaaagctgtggaagcatacaaagagtcactacgtaataatccgaaagataacgagacgcgttataacttggctttggctcagaaaatgctgaaagatcaggaacagaatcagcagaatcaagaccagaaccaagatcagaatcaggacaaaaaggagcaggaaaaagaacaagataaagacaaacaagaccaaaatcaacaagatcagcagaatcaggatcaacagcagcaacctcctcagccacaagaaaatcagatgtcaaaggaaaatgctgaacagcttttgaagtcggtgatgcaggatgagaaagatgtacaggataaggtgaagaaacagcaagttatccaaggtggtcgtttggaaaaggattggtaaataataaaagatacgataatatatgagaaaattaattttcttatggatagcactggtagtagtcagtctgcaagctttggctaatgacaaggtgtcatttaccgcgtcagctcctgatgctgtagcggtgggtgaccagttcagactggcatatacagtgactacacagaaggtgagagatttccgtgctccttctattaaggggtttgacgtactgatgggccccagtcgctctcagcaaagtagtatgcaaatagttaatggggtatcgacctcaaccagcagtattactttcacttatatactgatggctactactgagggtagtttcacaattccgggagctacaataacagccgatggtaatcagatggtttctaattctgtgcaaatcaaggttctgccagcagatcaggccggagcagcttcttcaggcggaggtagtagtagtcaacagggcaataccagccgtgcttcttcaggaacttctgtttccaatcaggatctctttattttgcctactattagtaaggccaatgtgtatgaacaagaagcattcttgctgacttataaaatttacactctggttgaccttcgtggttttgacaatgtgaaacttcctgattttaagggatttcattcacaagaagtcgaacttccgagtgatagaaaatggagcttggaacattataaagggcggaattatcaaactaccgtttaccggcaatttgtgttgtttccacagcagtctggtaatttgactattgatccggcacgttttgatgcttctattgctaaagctactcaagtatctgatccatttgaagctttctttaatggtggcagtaactacattgaagtcaaaaagacattgatgacgccgaaactaactgtagatgtaaaacccttaccaggcgataaacctgctgatttttccggtggagtgggagagtttagcatttcttcttccattaatagtactaatgtaaagacaaacgatgctgtaactattaaacttgtcatttccggtacaggcaatttgaagttaataggtgatcctgaggtgaaattcccagatgacttcgaggtatatgaccctaaagttgataataaattcaggctgacaagtgcaggactttcgggtagtaaggttattgaatatctggctattccacgcaatgccggaacatttaaaataccagcggtgaaattcagctattttgatatcaaatcccgtacttataagatattgactaccgaagagtatgaattgcatgtagagaaaggtgaaggaaatgcagcgcaaactattgctaactttacgaataaagaggatttgaaagtcttgaatgaggatattcgattcatcaagcaaaatgatgtgacgctttctcaaaagggagatttcttctttgactctatgctatattggttgctctatttagtacctggcgttgcgtttatcattttctttatcatttaccgtaagcagatagctgctaatgctaatgttgcgaaaatgcgtacgaaaaaggcaaataaagttgctgttaaacgtatgaagttagctggtaagttgttggctgagaataaaaaagatgttttctatgacgaagtcttgaaggctctttggggatatataagcgataaattgaatattccggtttctcgactttcaaaagataatattgaagaggaacttcgtaaatatggagtggaggatgctttgattaaagaattcctggctgcattgaatgattgtgagtttgcccgttttgctcctggcgatgataatcaggctatggataaagtctattcggcttcattagcagtaataagtaaaatggagaattcgattaaacattaattaggaggttatatgatgaaaaaaatactgttttttacttttgttggcctgttaatggcattgacctcttctggacagactgcatcggatacattacaacaagcgaatgattcggtaacaataggttcacacactgaattctcggctgctgcgcaagagaatagtgtgacaaaagcagaaggggatagcgcatatgtgaagaatgattatgcctctgctattcagatatatgaagctctgctgaaagaaggagaagcggctgaggtatactataacttaggaaatagctactataaggccggtgatatagcaaaagccattttaaattatgagcgtgcacttttaatacagccaggcaatgctgatattcgggctaatttggagattgctcgtgcaaaaacaattgataaagtgattcccgtacccgaggttttctttgtatcttggacgaaatcattgattaattgtttgagtgtggatgcttgggcaaaggtaggcgtcgtttgtttctttttgttgcttgcatctctttatttcttcttcttttccaagcaaatcgtgtggaagaaaataggatttattgcaggaatagtatttctggtgttagtattattagcgaatgtctttgcttttcaacaaaaaaatgagctattgaatcgtaacaatgctatcgtactaactccaagtgtaacagtacgtagtactccgagtgaaagtggcaccagtttgttcatattgcatgagggacggaaggttgaaattaaagataactccatgcgtgaatggaaagaaatccgcttagaggatggtaaagtaggatgggtacctgcgtcatctgttgaagttatctgatagatataattcttttataataagatagttaataatagaaagaagcctgttgaaagggaaaatacaaatcttcttttgacaggcttctttatttttgtaaaaaagacaccgaaatagtttgttttatctttttttttccttaagtttatagcgtgataagtgaaactcacagagttattaaccattaaatttataaatatgagaacaataacatttaatgaacttcgcagaattaaagattcattacctactggtagtatgcatagaatagccgatgagctcggattgaacgtcgatacagttagaaacttctttggcggtcacaattttaaggagggtaagagtgttgggatacatttagagcctggtccggatggtggtttggttatgttagatgatactaccgtccttgatagagctctaaaaattctagatgaaatgaatgccagtgctgagcctgttcgagcttaagaaaagaaagttataaatgaatcccaattgatagacaaacaattgggatttcttatttgtttataaagtaaaaacagttgattatggaagacaagttagtaaccttagctattctgacttatgcaaaagctcagatattgaagaatgtgcttgaaaatgaaggtattgaaacctatattcataatgtaaatcaaatacaacctgtagtgtcttcaggtgtgcgcttacgtataaaagaaagcgatctaccgcgtgcattgaagataactgagagctctgcttggctttctgaagaggtagtgggagggaagtcacccaaagtagaaaaggagagtaataaggtcttaattcctgtagacttttctaattattcaatgaaggcatgtgagtttggttttaatttcgctcagaatatgggagcggaagttgtgctgcttcatgtttactttacaccaatctataccacgtcattaccatatggagacgtttttaattatcagcttacagatgatgaaaatgtaaaaaacatattacaaaaagttcatgcagacttaaacactttatctgacaaggtaaaagcaaaagtagcttcaggagagtttccgaatgtaaaatatagttgtgtattgcgtgaaggtattccagaagaggaaattcttcgttattcgaaggaatatcgaccacgtattgtgattatggggactcgtggtaaaaatcagaaagatatagatttaattggtagtgtaactgctgaggtaattgagcgaagccgcgtaccagttttagccattccggagaatactccatttaaacagttggcagaagctaaacgtattgcatttatcaccaattttgatcaacgggatttaatagcatttgattctttgattgctgctttaaagccatttcatttctctgtatctttgattcatctgtcagatgttaaggacacttggaatgaaattaaattaggtggtattaaggaatactttcaaaagcagtatccggacctggaaattcattatgatgttgtgatgaatgatgatttcttgaacagcttagataattacataaaaactaatcatattgatataattacgttgactacttataaacgcaatatattctctcgcttatttaatccaggtattgctcggaagatgatttttcattctgatacaccgctgttagttatttatggacgcccaagctaaaataaatagcgcaagcatttcaaattaatatcactattatgtttaatatataatactaatattctttttgcaaaattaaagctaacttcttaagtctaccatatcttttggcggtcctgcctcgcgtacccagccctcaagtgcggtacggcttataatgtgtacttaatcatataaaataaaccctaaaagttttttgtctaacttttagggttcacttcaaaataaactattttgagacagctttgagacagctgtttttttaagtttatattttacatcagcttttcaatttcttcaaattctggtcccatatctaaattataatatactctgtaaagaccattcaaccataaatccttttggtcaggttttaattctcttgctttttcatagcaaggttttgcattttcatagaaagctttcaaagtaatctgatcttctttatatttaggatcattaacgtcagtagtagctttttctgagaagtcttgagcttggagacagtagatcagtcctaaattggaataagcttctgcataagtaggatctacctcaattgtctttttgtagtattcaatagccttatcataatccttcatattatggtaaagatatccttttacgtacagatagaatgtattattggggtctttagctaacatttcatcagcgaattgcatggcttcatcgtatttattgttattgctataataatcaattaaatgaccgaagaagaatgaatgctgagggtatttttgcaaaccttctttcaatgaagcaatccacttaacagtatcgccttgtgcttttaaagctgtagagatgaactccatagcatactgacctacttctttgtcgttctgtgcataaggagcatatttcagaacactgggataatcctccatctttgctgctgccaagcttgcataataagcaatctgagctaagagtgtatctgtctgcaagaagttttccttttcaaacatcggattctgagcaatttcaatataagttccaaagaaatctaatgcttctttgttcttctctaagttataatattgaataccaccattgatcaagtttgggcgttctgctacaatagcagcagcattgggttttctgtacttgttcttgatttttcccttttcatttggaacctgtgcgagttcatcgcacttaaggtagtatttgcacatattcaatgcgctattatataccttaagagtatcataaggttttcttaaataggcattttccatctgtttttcattaatccttttctgaataaaacctgctacatcccaagtatcggcattatcctttgtttcaggattagtcaaggcttgattgatgagctgctcggccttattaaagtccggattcacttcatttgcaatgcttttagcttctttcacagtcttttcttgagcgaaagtgaagcctgcagcgagcaataaaatcactgaaaataatactcttttcatgatagttgtaaaattaaaattaatattatgtctattctttatcttcattattgacttcattatcagagttatagtctttctcctctccttctacttcatttatagtaggcggaattggagaattttcatcatcaacaggaatttcatcttccatactttctgatgtaaccttacatactgaaccgatctcatcgtttctcttttcaagattgatcagacgaacaccttgggtagcacggcccataatacggacatcagcaactttcagacgaatggtgataccagatttattgataatcatcaagtcattatcatctgttacagactttattgttaccaatttacctgttttatcggtgatattcatcgtcttaacacccttaccgccacgattagtcttacggtagtcttcgatatcagaacgtttgccatagccttgttcagaaactaccataatggtttctgcttcaggatctttgatgcaaatcattccaacaacttcatcttgcccgtcttcgtcaagcgtcataccacgcacaccggttgcagtacgtcccataacgcgtacagcactttcgtggaagcgaatagcacgtccattacgattggcaatgataatttcgttgtcaccgttagtcatacgtacttcgataacgcggtcgtcctcacggatagtaatagcgtttacaccattctggcgagggcgggaatactgttcaagtaatgtcttcttgataacaccatttttggtacagaataagacataatgactgttgatgaagtctgtgtcagaaaggttcttcacacgcagatatgcatttacagcatcgtctgaatcaatattcagcaagttttggatggcacgtcccttggaattcttggtaccttcagggatttcatatactttgagccaatagcacttacccttttgagtaaagaacatcatggtattgtgcatggttgccggatatatgtgttcaatgaagtctgcatcgcgggtatctgtacccttggagcctactccaccacggttttgagcacggaactcactcaatggagtacgtttaatatagcccatatgagaaatggtgataatcatttcgtcatctgcatagaaatcttccggattgaattcttcggatgagtaaacaatctcagaacgacgttcatctccgtatttagcttttacttcaattaattcatcggtaataactttgcggcaaagttcatcattcgaaagaatttcttcgtaataagcaatcatcttcattacttcttcatattcagcgtgaagctgatcctgcatcagtccggtcaattggcgcaaacgcatttctacgatggcacgagactgaatttcagttaattggaagcgttctatcaagccggcaatggcatcattaggtgtctttgcggcacggatgatacggattacttcatcgatattatctgatgctatgattaatccttccaatatatgagcacgttctttagccttacgcaagtcatattgagtacgacggataaccacctcatggcgatgttctacgaagtacttaatcatgtctttcagattcagcaaacggggacgcccgtgtaccaatgctacgttgttcacactgaaagaagtctgtaacaacgtcatcttatagagtttattcaagactacgctggcgttggcatcacgtttgatatcaattacaatacgcataccttcacggtcagactcatcattggcattggagataccctctatcttcttatcattggctaaatcagcgatattcttgatcagttccgccttattgacaccatacgggatttccgtgatgacaattttgtcatgtgtagaactggtttcaatttctgctcttgcacgcatgataacgcgaccgcgaccagtaagatatgcctcgcgtacgccactcataccatatatatatcctcctgttgggaaatcgggagctttcacatagttcatcaactcctctatctcgatatcgttgttctcgatgtatgcgatgcaagcatcgataacctctgaaaggttgtgtgtcggcatattggttgccatacctacagcaataccagatgcaccgtttaccaaaaggtttggaatacgggtaggcataacggtaggctcctgcaaagaatcgtcgaagttgctctgcatatcaacggtttctttgtcgaggtcttgcatcatatcttcaccaatcttgcgcaagcgacactcggtgtaacgcatagctgctgcgctatcgccgtctaccgaaccatagttaccctggccatctactaccatgtaacgcattgcccaaggctgtgccatacgaactaatgcaccgtaaacggaatagtcaccatgcgggtgatacttacccaatacttcacctacaactctggctgattttttataaggtttatcagacgtatttcccagtcccatcattccgaagagaattctacggtggacaggcttaaaaccatctctaacatccggaagggcacgcgaaacgatgaccgacatggagtagtcaatgtacgatgacttcatttcctcctcgatgttaatctttataattctgtcttgttcaagcatttaaaaagattattaattatacatactttggttcatgaaaaaccacgctaaagtactgcttttttacgatatacaaaagttttcgcccataaactttgtttcagaaccattctctcacctactttgttcttataatatataaataaggtattaataaggagctttttcccaagaatgaaagcactttagtatgatactggtgaacggatattaaactgtggcacgggttttgtatataaataataaataaaacgatgaaatacgtacaggaaattataaatgcgtatctttgtattaagtaacaccttagaataaggaaggagaatattaagtatgaataatcagttttcacaaagagtttctgacattatcacttacagcaaggaggaagctaaccggctgaagaatagatatatcggtccggagcatcttctactcggcatgttgcgagacggcggagggaaagctatagaaatattgcagaaactggatatagacctaaacagggttaagaaacgcctggaaggttttttaaaagagattgaagatgataacttgttgcccgatgcagacattccattgtctccgatggcagctaagatattgaaaatgtgtatactcgaggctcgtctgctgaagagtgccactgctgatactgaacatgtattgctggctatcttgaaagacggtaataatttggccgctacggtattggaagaaaataatatagattataagtcagtgttcgaacagctttccatgaaagccagccctaacgcaggtatgggatttacggaagatgatgatgaggaagaagatgaaatgaatatgtcttcacgttcttctcaaagtggtagttcacagtcttctacgcaaacagcgtctaagaaaccatccaatgatactccggtattggataactttggtatggatatgacccgggctgcggaagaaggtagactggatcctgtggtaggtcgtgaacgtgaaatcgagcgattggctcagatattgagccgtcgtaagaagaataatccggtattgataggtgagcctggtgtaggtaaatcagctattgtagagggattagcattacgtattgttcagaagaaagtatcccgtattctgtttgataaacgtgtggtaatgcttgatatggcttctgtagtagccggaaccaagtatcgcggacagtttgaggagcgtattcgttctatcattaatgagttgcagaagaatccgaacgtaattctgtttattgacgagattcacacgattgtgggtgccggagcagctgccggttctatggatgctgccaatatgttgaaacctgcattggcacgtggtgaaatacaatgtataggtgccactacccttgatgaataccggaagaatatagaaaaagacggtgctttggaacgccgtttccagaaagtgattgttgaaccgaccaccgctgaggaaacgctccagatattgaagaatatcaaagagaagtacgaagaccatcataatgtgacttatacggatgaagcgctggaagcatgtgtcaagttgacagaccgctacattactgaccgtaactttccggataaggctattgatgctttggacgaagccggttcgcgcgtccatctgacaaacattactgttccgaaagagattgaagaacaggagaaactgattgaagaagcccgtcaacaaaaggcggatgcggtgaaatcgcagaatttcgaacttgctgccagcttccgtgatcatgagaaagagttttctgctcgtctggaagaaatgaaggctgaatgggaagctcgcttaaaagatgaccgtcagatagttggtgaggaagaaattgcgaatgtggtttctatgatgtccggtgtgcctgtacagcgtatggcgcaggctgaaggtattaagttagcgggtatgaaagaagagctgcaagctaaagttatagctcaggatccagctattgaaaaggtgacgaaagctattctgcgtagtcgtgtaggattgaaagatcctaaccgtcctatcggaacattcttgttcctgggacctacgggtgtgggtaaaactcacttggcgaaacagttggcgaaatatatgtttggctctgccgatgcgctgatacgtgtggatatgagtgaatatatggagaagtttaccgtttctcgtcttgttggtgcacctccgggatacgtaggatacgaagaaggcggacagttgacagagaaagtgcgccgtaaaccttactctatcgtattgttggacgagattgagaaagctcacccggatgtattcaacatcttgttacaactgatggatgaaggtcgtctgactgacagttatggcagaactgtagacttcaagaatacagtggttatcatgacttcaaacattggtacacgtcaattgaaagacttcggtcgtggtgtaggttttgccgcccaaaatcgtacggatgataaagaatattcacgcggcgtgatacaaaaggctttgaataagtcgtttgcccctgagtttctgaaccgtgtcgacgagattattactttcgatcagctttcgctggatgctatcgaaaagattatcgatatcgagttgaaaggcttgtatgagcgcgtagaatctcttggatataagcttgttattgatgctaaagccaagacgttcatggcatctaaaggatatgatgtgcagtttggtgcccgcccgttgaagcgtgccatccagacttatctggaagatggactttcggaattgattatttcttctgaattgcagacgggcgatacgatttctgtctctttgaacgaagaaaaaggagagctggacatcaagaaagcataaaaatgaagtcttcttagaagatgataaacagtcaaaatgtcagtccttatgggctggcattttttttgcattacacttgccaaacgattaaatatataaacttaaaaatataaatcataagtagtatgcaaaaaggaaatattggggtaactaccgaaaacattttccccgttatcaaaaagttcttgtacagcgatcatgaaatttttctccgtgagttggtttctaatgccgtagatgctacgcagaagttgaaaaccttagcctctattggcgagtttaaaggtgaggttggcgatttgaccgtacatgtgtctttaggaaaagatacaattactgtttcggaccgtggtattggtttgactgccgaagaaatcgacaaatatatcaaccaaattgctttttcaggtgccaacgatttcctggagaagtataagaatgatgctaatgcaattatcggtcacttcggtttaggcttttattcagctttcatggtagctaagaaagtggaaattatcacgaaatcccataaagaaggtgctcaagctgtgaaatggagttgcgatggcagtccggagttcaccattgagaacattgataaagctgaccgtggtacagatatagtactttacattgacgatgaaagtaaggaattcctggaagaggcccgtatttcttctctgttgaagaaatattgtagtttccttcccatacctattgcttttggcaagaagaaagactggaaagatggaaaacaggttgaaacagacgaagataacatcatcaatgacagcaatccgttgtggacattgaaacccagcgaactgaaggatgaagattataagaagttctatcgtgacctgtatccgatgtctgatgaacctctgttctggatacatttgaatgtagattatccgttccatctgacaggtatcctctacttcccgaaagtaaagagcaatatcgaactgaataagaataagatacagctttatagcaaccaggtatacgttacggattcagtagaaggtatcgtacctgactttctgacactgttgcatggtgtgctcgattctccggatattccgttgaatgtatcccgttcttatctacagagcgactctaacgtgaagaagatttcgacatatatcacgaagaaagtatctgatcgtctgcaatctatctttaaaaatgatcgcaaacagttcgaggaaaagtggaatgacctgaagattttcatcaattacggaatgcttactcaggaagacttctatgacagagcaaaagattttgcccttttcaccgatacggatggtaaatgctatacatttgaagagtatcagaagctgatcaaagataatcagactgataaagatggcaatttgatctatctgtatgctaatcataaagatgagcaattcagctacatcgaggctgctaagaataagggatacaatgtattgctgatggatggtcaactggacattgctgtagtaagcatgttggagcaaaagtttgagaaatctcgctttacccgtgtagatagtgatgttatcgataatctgattatcaaagaagataagaaaggtgaaactctggaagcaggcaaacaagaagctctttctgctgtgttcaagagccagttgcctaagttggaaaaggttgagtttaatatcactgcgcaggctttgggtgaaaactcttctcctgtgatgattactcaaagcgaatatatgcgccgtatgaaagaaatggctaatattcaggcaggtatgagtttctatggagaaatgcctgatatgttcaaccttgtgctgaattcagatcataaactggtgaaagaagttcttgcagacgaagaaaaagaatgcgactctgttgtagctcctattcagcaagaaatgaatgacgtagacaaacgtcgtaatgagctgaaagataaacaaaaaggtaagaaagacgaagaaatttctactgctgaaaaggacgaagtgaacggattggatcagaagtgggaagaactgaaaacaaagaaagacgaagtatttgccggatatgcagctaaaaataaagttgtccgccaattgattgacctggcattgctgcaaaatggcatgctgaaaggtgaagctttgaataactttgtgaagagaagcatcgagttaatctaaatacgccctttattcacaatctatatgccgggagcattgcaacttttataagagttgtaatgctccttttttcgtatattttgtgtgggaacgcttgttttttagcgttggatacgtccaatttcgaaacaattgcatatatttgagctttgataataatatattttcagctcggaactttgaagtatgaaaagaattcttttgcttttatcgttttgtttcttgttgctgcccatgttgcatgcccaaaaagttggacttgtattgagtggtggtggtgcgaaaggtatgacgcatatcggcatcattcgggctttggaagaaaacaatatccctatcgattatattaccggtacatccatgggagccattatcggttccttgtatgccatgggatactctcccgatgatatggaggctttgttgcgttcagaagactttaaacgctggtattcgggaaaagtagaacctaaatatgcctattatttcaagaaaagtattcccacaccggagttttttaatatccgctttgattttaaggactccttgaatgtcaaaccgcaattgccgaccagtatggttaaccccattcagatgaatctggtgtttgtggagctgtttgcccgtgctacagctgcttgtgacggtgattttgataggctgtttgttcctttccgctgtatcgcttctgatgtatacaataaacggcaaatagtgttagggaaaggtgacctgggagatgctgtccgtgcttctatgagtttcccgtttgtttttaagcctattgagatagatagtgtgctggcttatgatggtggtatttacaataactttccaacggatgtaatgcgagatgattttcatccggacattatcattggtagtgtggtggccgccaatccatccaagcctaaagaaaatgaccttatgagtcagattgagaacatggtgatgcagaagacggactattctattccggattctgtcggcatcctcatgacattcaagtatgatgatgtgaacttacttgatttcgaccgtcttcaggaactccatgatataggttacaatcgcactcttagcctgatggactctataaaggggcgtattcatcgtagggtgaatgcagataatgtgcgtttacgccgtctggtttatcgcagtaatctgccgcagctctatttccagaaaatttatattgatggagctaactcccagcaacaggcttatattcagaaggaatttcatgatgaagaagatgaaccattcacctacgaagatctgaagcgtggatatttccgtttacttgcggataacatgatatcggaaatcattccgaaggcggtattcaatgaggaaaccgatatgtacgatttgcatctgaaagtaaagatggaggataatttctctgtccgcttgggggggagtgtgtctacaacgagttccaatcagatatatctgggactgggctatcagaacttaaattattatgccaaagagtttacgtttgatggccaattaggtaaagtttataataatgcccaactgatggcgcgtatagatttgcctactcatattcctacttcatatcggcttattgcgtctatcagtacttttgattattacaagaaagagaaactgttctctaaaaacgataaaccttcctttaattcaaaggatgaacgatttctgaagttgattatcgctttaccattcttagcgaataaacgggctgaatttggctttggtattggaaaattgcaagataactattttcaatccagtgtgataaactttgaagaagaccgctcggacaggagtttatacaggcttataggcggttctattagtttttatggaagtacactgaattctcgtcaatacgctacaaaaggatataacgagaaattaatagctcagatttttacgggaaaagagagatataagcctggaaatccggcagaacagcctgttacacaggaacggcaatcatggttacagatttcttatatgaaagaagcatatcatagtatggcgcctaaatttgttttggggtggatggcggaagcgctgtattcatcgaggaatttctcggagaattttacggcgacaatgatgcaggctgcagagttttcgccgactccgcatagtaagctgatgtataatgaggctttccgtgccaatcagtttttggctgccggtatcaagcctatgtttattttcaatgatatgtttcatctgagaggagaattttatggatttatgcctatttttcctattgagaagaatacgcaaaacaaagcattttatggaaaagctttctcaaaggtagaatatatgggagaagtttctgttatttgccaattaccctttggagcgatctctgcttatgtaaatcattatagctcaccgagaagggagtggaatgtaggtctgagtatcggttggcaactgtttaattaccgtttcatcgaataattttcttcaaaaaaagtttgtagaatacttgcagtttcggaaaaagtccgtatctttgcacccgttaaacaaaaaggccgcgtagctcaactgaatagagtagctgactacggatcagccggttacaggtttgaatcctgtcgcggtcacatctttttgacaacaaggtcgcgtagctcaactgaatagagtagctgactacggatcagccggttacaggtttgaatcctgtcgcgatcacgaaaaacctctgcaaagtactttgcagaggttttttgttatacaccgtagggtaacggttatatctgtgtagactcatgcaaatatgtgtgtgagttgatacagatataacggggcagtagaaatttagtggggatatccatatatctttgccagcctaaaaagaaaaaactttctgtctgccactccatgtaaatttgccctaaagagtttaatcttggcgttgaaagattcggctgccgcgtttgatgccctgttgttgtagaagtttagaatatcatcatagtgttcgtagaatgtagccgcaatgacattgaaagattttatccttgactcatccactttattataccatcgagccatgcttagccttgcagcgtccttaatggtgttttttgcaaatatcatccttaatgaatgtgagagcccataagccatttgtatatcaggatattccttaaacagtatttcagccctttccttttgtttttccgtccacttttccgcggatttaaacaagaggtatctgcttctgaccagcagttccgggcgggtgtctccgtttgggaatcggtaaggcatgtatgactttcccgcttgtttacactcctccatttcttcattgctctgctgtaaggcgtcccaacgatgggctacgcggatttcctgtacagcatcacaggcgagtttctgtatatgaaaacgatctatgacgcgtttggccttggggaaggcaatggtgacaatcctgcgcatggaatcggacaggtcaagggtcacttcctccacagcttcacgggctttctcgtttatttgtttgagcacctgtatgacatcctccgatttggtgcctgcgacagctgccacaaggctttcctcatgtgtatgccggtcacggttggtgacaaaagtgtataattctccattagacagagacgactcatctatagccaaatgcggaccgatgttctccgggaataaaatccattcatccgcatgctccaactgctcccaattcctgaaaccactgagtgtttccttgtactgtttctcgaaagtatgtccatctatatggtagaattcctcaagcgtatggcaggtcacaggggacgtctccatacgtttcttttaaaaaagcaccaaattccttggaataacgggtacctttacaaacgacatcaaggttgatagggatactgaaactcttgcctgtgcgcgtatcggtccagcgacgacggcggatcttcaggaggaccttatggtcacggatgggaaagtccgtgatacttactgtttccatgaagcccttggattcaaagtgtacatcatgggataatgcaggattcatcagttcatcaagatgaatatgtatttctgttgaggtctgttcaacgccgacaactgaaaagtagttgaggatttcagagggaagcacgatgcgagccaacacctccaattgatttgtttccatgaggcaaaggtcggaattttgggtgagaataggaaacgataatccccactaaatttctactgccccgatataactgtgtgcttgtgcagatataagtattaatttctttccctggatgaataaatccgtctcatgagacggtaaaaatcagcttgtgagacgaaaaaaatcgtcccctgagatgaattttttcatctcaggggacgatttacaaagaaatatctattctttttcttagcacttaatgtttaattcatccaaaatcttccgcatggcctcaaaagtagtaatcctggtaggcacaagcgggaggcgaagtttattttcaatcattcccataacgttcaacattgcttttacgcctgccggattgccatccacaaaaagaagcttgaataactcggcaaatttatggtggatagttaatgcatttgcataatctcctcgcaatgccagtcttaccatgcggctaaattcgcgtggaaatgcatttccgatgaccgatatgataccaacagctcccaaggtaatcaaagggaaggtaataccatcatctcccgaaataacgtcaaaattggccggtttatttttgatgatatcatccatttgagtgatgtcaccggaagcttccttgatagcaataacatttttgaagtcacgggcaatgcgcagcgtggtttctgctttcatatttacaccggtacgaccgggaacattatagagtacaattgggagctctgtagcctctgcaattgctttataatgttgataaataccttcctgagaaggtttattataatagggaacaacagacagaatggcatctactccggtaaaatcgtcgttttgaagcgtatccacaatggcacgcgtattatttccaccagcaccgagcaggataggtatccgaccatttacgcgttcgatgaccattttcttgattttctttttttcttcttccgtcagtgtcggagtttctgccgtggtgcccagcacacacaaaaaatcagtattgttttgaagttgatagtccaccaaacgtatcaatgcatcgtaatcaacgctttcatcctctttaaaaggagtaatcagcgctacccccattcctttcaatttagtctgtatcatgagtgaaatttaagtaatctctaattaaatgactcgcaaaagtacgaatattttcgatttctacagcaaatataagctataaaaaagatttcactggaaaaatgttacgaaatgagcgctaaaaactcatcttcgctcactatctgtacacccagcttttgcgctttttccaatttggcaggtcccatattttctccagccaggataaaactggtcttggcagaaatactacctacattttttcctccattcttctctatcaaatctttatattcgtctctggagtgatgggtgaacacgccactgattacaatagactgtccggcaagcttatcggtatagccgctcaggtcttcttccttccggttaaactgtaatccggcaactttcagtcgctctattaattctctattcagaggattagcgaagtaggaaatgatgctttgcgctattttctcaccgatttcatcgatatttatcaatctttcaagatctgcattttccagttcttctatgtcggtgaaggacttagctattttctttgctacagtttcaccgacaaagcggatacccagggcgaacaaagctcgctcaaaaggcactttcttactttgggcaatacccttgacgatattttccgccgacttatctcccatacggtccagattcttaatatcgtctacagtcaatttgtacagatctgccgtatccttaatgagtcctaaccggtagaacatatccacagtttccgggcctaatccgtcaatgttcatagccttccggctgatgaaatgctcgatctttcctttaatctggggcggacaagccgtttcgttggggcaataatgcgcagcttctccctcgtaacggattaatttgctgccacattcagggcaatgagtgatgaacttcactttttcacctaccatcatactccgggcatctttatctactccggtaattttgggtatgatttcaccgcctttttctacataaaccatatcgccgacatgcaagtcgagcccttcaatgatatccgcattatgcagagaggctcgttttacgattgtacccgataattgtaccggatccaggttggcaacaggggttactgctccggttcttcccacttggtaagtcaccttgtttaagcgggtcaatgcacgctctgcctggaacttatatgcgatggcccaacgaggagattttgcggtgaaaccgaggtttttctgctgtttcaggctattaactttcaaaacaatgccatccgtggctacaggtaaattcttccgttctgtatcccaataatggatgtaatcgaacacttcctgcaggctgtggcacttcttcatatggtctgagattttgaatccccattgtgcagctttctgcaggttttcataatgtccgtcgcaaggaagttcttcgcctaataaataataaaggtaggcatccagtttgcgggaagcaactatagcagagttttgtaatttcaaagtgcctgatgcagcattacgcggattagcgaaaagaggttcttcgcgcgcctctttttcgcggtttagttcctcaaagacttcccacggcattagtatttcccctctgatctcaaataattggggataatcaccatgcaaaacaagggggatagtacggattgtcttcacattatctgttacatcatcgcctttttcaccgtcaccacgggttacggcacgtattaacttaccgttttcgtatgtcagcgagatggaagtaccgtcatatttaagttcggcacaaatttcaaaatcttcgttcagggctttttgagtgcgatcataaaagtcagatacctcaccttcagaataggtattacccaacgaaagcattggatatttgtgtgttacttgcgtgaaattcttattcaaatcgcttcctacgcgcatggttggcgaattttcgtcctgatattcaggatgttctcgctccatctcctgcaattcccgcatcatgtcgtcgaactctttgtcggagatttcgggagcattcaacacgtaataattgtagttgtgccgatgcagttcggcacggagctgatctatcttttcttttgcagtcatagctatttcagattgtttgaacgcaaaaatacaggtttctcctctaatatttgtacttttgcagaaaattaaaattaatatgcgcattgatataataacagttctaccggagatgattgaaggctttttcaattgctccattatgaaacgtgctcagaataaagggcttgcagaaatacatattcataatttacgtgattatactgaagataaatatcgacgggtggatgattatccttttggtggttttgccggaatggtgatgaaaatagagcctatagagcgctgtatcaatgccttgaaggcagaaagggagtatgatgaagtcatttttacgactcctgatggtgagcagttcaatcagccaatggccaatacactttcacttacccagaaccttattatcctttgcgggcattttaaaggtatcgattatcgtattcgcgagcatctgatcactaaagaaatcagtatcggagactatgtgctgaccggtggagagctggcggcagcagtgatggctgatgctattgttcgtattatccccggtgttatttctgatgagcaatcggcattgtccgactcattccaggataatcttctggctgctccggtctatacaagacctgccgattacaatggttggaaagttccggaaattttattgtccggacatgaggctaagattaaggaatgggagttgcaacagtctttggaacggacgcgcagactccgcccggatttgctgggagaggaataaatcagttgtataaaaatagaaaaaggacattcatagcgaatgtccttttttatgtaaaataggtgcgaatgatattcacttgttattggttacacctcaagcgcaccgataatttctttcacggacttatatccgtgtctatcgagatagtcgtttataccttccgctactttaattgtaactgccgggtcgatgaaatttgccgtaccgatttggatggctgaagctccggcaagcataaattccattgcgtctttccagttcatgatacctcctaaacctatgacaggtatttttaccgcctgagcaacttgccataccatgcggagtgcgattggttttactgctgcgccggacataccacctgttacggtagagagtataggacgcctgcgttccgcgtctatagccattccaagcagtgtattaattaatgaaacgctgtctgcaccgccattttctactgcacgggctatttcagcgatgcttgtcacattgggagacagctttacgataagtgtctttttgtaagctgcacgcacagctttcaccacttcttcggctccttttgcagtgacgccaaaagccattccaccttgcttcacattagggcaagagatgttcaattcaatggcaggaattttgtcaagttcgttaatggcttccgctgtttctacataatcttctatggcagaacccgaaacatttacaatcatattggtttcgatgtccttaatacgcggatatatctgttcaacaaagtaatttactcccttattttgcagtcccacagcgtttaacatacctgaaggagtttctgccatacgcggatatgggttaccttcacgtttgtgaagagtcgtaccctttacaattataccacctattcgcgtaatatcaatgaaatcggcaaactcttcaccatatccaaatgtaccggaagccgtcatcaccggattcttcatttgtaattctccaatgtttacacttaaatctgccataatagtttgtttatattaaaaaccggaccttctttacatacacataaatgcccttccgttgtattttctacacaacagaggcaagcgcctataccacacgccattgtattttccaatgatacttcacaagctatatctttacttttggcatatttagccaccgccatcatcataggcttaggaccacaagtgtaaatctgctcgaattgcaccttattcaatatggaatgttgtgtcacataccccttttcgccatgactgccatcctcggtagtcgtatatacatcaccataagctgcaaactgctccagttgcagcaagtccttattgcttcttgctcccagaaggaacgtcggtttactgccgtttttagctaattgctcgcccagataaagcatgggagctgtaccaacacctccacctactaacagaagcttatcagaagctttttcaggcattgtgaagccatttcccaaaggaagtactacgttgaccgtgtctccggcttttgcttcgcctaattgcctggttccgtctccaatcagttggatcagaaaccatacttcattgcgttgtctatctacataattaatggaaatcgggcggcgcaagaaagtagttggagatccgtccacacgtatttccgcaaattgtcccggaagcatatccggaagcggagacggagacgtcagtttcaatagcacataattagcgtgcagtcggacgttctcagtcactgtcaaatctaaaatgtattttttcattatcctatataaagaggtgaattttatcttcagggtacaaagataatgcaaatcgaatgcagaactttcatgcttgcatgaaaaagttctgctgagatgcttatcttatccaaagatacgggaaattgtgcaaatagtcgtttatgagccttacttttcgggtttaaacgtctcgtacgtattatcgtcgaagaaaattcttatttcagtgatttttctgggaggcctttctttatagataatctcctgttttacaatttctttagtagcatttgcaggtgtttctaatgcgatttccttgcgattttcggccggacctgtctctttggacggatttacgggattctcagcgaataatggatagtcgaatccgctctcgatagaagagtcagagccggaagacgtattactcatttcaccttgtccggtaagtaaccattccaaatttatatcattatatctttgatgtagacgaagaataacttctgtacttggatacttattacgcgggcctaaaatatgtgagatggtagcttgagctacaccaatactttcggcaaatgcgcctgcggttaatttttcccgatccatgatcattttgaacctatcttttatgctcataactgttgcgatataggtgatgtttacaattgtattgattctctttgaaattacaaaagtaaaaaaatgaagttacaaaagcaaattaaaaatgtgaattcttttatatcacaattgtgtacttgttatttcaaatgttatatatacaaatgtgatgatatatattacctagattttaagcccatatttttactttaataaaactatgtatattattggttattatgtatataagtttaagttttttctgtggtgtatcccatattacaattgttttctcattgatttctctatttatgaactgatagatcatataaatgactatatttgtactgattattagtaatttaattgttgttttactcctcgttaacccctatcctattacctttgttatttcactattacttcattaaaaatagtcttattacaattgtgtattgcatcatttaattacgtttgttatatgtatagttgttatgtatccaattgtgaacataatgatattacgtttttaatattccatagttgaaatagcaactatttccttttctaattgcatttattcttgataatagattcgatattacagaaagaatttgttacactaaaataaggagagtccaattgatatgttctaaagtcttcgtaattgtaaatccttgctttatttctgtataaatggtcgtgaacttggaattttttaattctcaggagcttatttagtgtttatttgattgtaatacagtgtattataccctattttttagttctaaaattctctcattctagaaaaataacctctttttaagtgagaaatgacataatgatagtgaaaatggcatttacttctctattattgctgatatagttaacaagtataatctcttctaaaataagaaatagacgatctatttctattgatctgctgaccactttctaaatataattttcctttttcttagaaaaagtatattgttttcctataaaaatatgcctgctttactcgggacaggagattatactatatataaacacatggtctatttaatgcaaatagaccatgtgtttatatcagataaatggtctgttcattgtatatagaccatctgtttcagcgaatatgttgtatgtatttcagatacccttccacactctattacctatgaacagtacgtttgggaacagtggaagggggtgaaggaaaagctaaatttcttgtttaatgaagagtgtatagaagaaaaaagctgttaatgcaggatcttgaagaccagttcgcgaagaatatccccgtcacttaaagatggatttcccactcctttagattttgcatctgcatatcgtatttctccgataatttgcatagtctttactccattatatcgacgcatagctgcgagatagtctttggcctgccagggggtacgtagtcccaacatgttggctatgccttgctccgatttttcaggggcataataggccaacatcaagttagaaaagaatccaaaaagtaaagataaagtcatttgaatagggtttgttttcggattttcttcaaaatattttattatcttattagctttcaggacatccttttcaacgagggcactgcgcaattcgaagttgttataatccttactgataccaatgttcttctctatctgttcgggggtaacgcgtgtatgaccttttggaagtgtaatgatcagtttttccagctctcctgtgaggcgactgaggtcggcgccaacgaaatcggccagcatggcagtggctttaggttccacgtcgatacctttgcgtttcatataagaagtgatgaatgcaggcagttgcgcatccttcacttttttagattcaaacaggacaccagtcttttcgatttcggcagccagcttctttcttcggtccagtacgccatgtttatggcatattactaatatggtagaaagcagcggtttttggaggtaataagaaagttcctccatattacggatattctgcgcttcctttaccaccaccacctgatgctcggacatcatcggataacgcttggcggcattaataacagtagccatatcaacatctgccccgtagacaacggtcaggttgaactccttttccgtttcggtcagaatattgtctgttatatagtcggcgatgaggtcgatgtaatagggttcctcgcccatgagataatagacgggacggtattgcttcgctcttagttcctttaagatgtcatcacacgtgatttcctgttttgccatattcgtttttaccagtcgaatttcagatgttttacggttttcttctcgtcgataatcatacgcagggatgcgatgccgatttcaacgtgctcggttacgtagttttgggtaaccagattatcgcttttatcggtttttactccttcaggaatcatcggctggtcagaaaccagtaagatggctccggtagggatgtgattggcaaaaccgcaactgaagagagttgctgtttccatatcgacagccatggcacgggttttcttcaaatattccttgaattcctcgtcatgctcccaaatgcggcggttggtagtgtatacggtacctgtccaatagtcgcgggcatggtcgcggatggatgaagaaacggcacgctgcaacataaatgccggtagcgccggtacttcgggcgggaagtagtcattggaagttccctcgccacggatggcggcgataggaaggatgagatcccctattctgtttttcttatcgataccaccgcacttgcccaggaacaggcaggctttgggctgtatagcacttagtaaatccatgataattgcagcgttagggcttcccataccaaagttgataatggtcatgccttctgctgaagcagacgtcatattagcgtctttaccaagaacgggcacattgaacttctctgcaaaaatatccacatacttgttgaagttagtcaacagaatatactctccaaagtcctcaagcttacgttttgtgtaacgaggcagccagttagctacgatttcttgctttgttttcataagatttcattaaatttgttccctaaatactttcagggagcgattatttaactcacaaaagtacaataaaaaagtagaattcggaaatttgttaatcacttatcacatatcaatatgttatcgttaaacttacctgtatttgatgctaaagtcgtgaaccgtgaagggaaacctgctattttcgacgtgatacggcgccgatatgtagcactgacgcccgaagaatgggtacgccagcatttcgtacattttctgctgaaccataaaggatatccgcagacattgatggcgaacgaggtacaggtacagctcaacggaacgaagaaacgttgtgacacagtgctttaccgtcgtgatctcacggcacggatgattgtggagtataaagcgccggacatagagattacgcaagcggtgttcgaccagattacgcgctacaatatggtgttgaaagtagattaccttgtagtgagtaatggaatgcaacactattgctgccggatggattacgagcggaatagctatacttttcttccggatattcctgattatcagacgttataatatccattaaaaagggctacaccctttaccccggatggctacaccctttgggggatatggtgtagccatgtgaggcaaagggtgtagcccttttcaatgagactgatcaggatttaaatcaatgaatccaatcagggtctaaaccttctcagtcttttcttctatctgcttctttcccaacttttcctgtatcttctgcatcaactcatagaaattaggaatataaactgtggcaagcagtgtattcagtgccataccaaacacgacagcagctccgagtgcaatacggctttccgctcctgcacccgtagcaaacagcaacggcatcacaccgaatacaaatgccagggatgtcatcaggataggccgtaagcggatatgccctgcctggaatgccgcatcacgaatggagttgccttgcgcacggaaatcgcgggcgaactctacaatcagaataccattctttgctgacagtgccacaagcaggataataccgatttgtgtatagatgctgacaggtgttcccataatgagacagccaatcatcgctcccaacaatgctaccggaagcccgatgaccgcagctaccgggctcgtccaactctcgtactgtgctgcaagtaccaggaaggcaacgagtaacgccattacaaacacaacggttgtcgttgtgcctgcctgtgtctcctgataggctactgacgtccattcataaccaaattcatcgcccagttgctccttaaagagcgcctccatttgctgtatcgcctctccggaactgcttcccggggctacgttgcaagtgacggaggcagtggaatacatattgtaacggttgatctggtccattcccaactgttcctccatccgcataaaggctgaaaacggtaccatctctcccgatgcattctgtacactcaacttcagtacatcgtcaatgatccgttgggcacgatcccgtgcaccgagttttacctgataaatacggccgaactcaacgaaatcgtttacataagcagctcccatgtagtaacctaaggaagtaaagacactgttcagcggaatacccatcaattgtactttatcccggtcgatgttcaggaaatactggggtacattagcctggtactgactgctgacggatgccaatgcaggtttggtgtgataggttgccatcagcgtctctacagcatgctgcatttctgtggcaccgaggttgttacgatcttccacttgtagctgtagaccgcccgtagcaccgagtccgggaatggcagggggcaccatggcaaaaacttctgcttcctgaattccataagcttgcgcattgaaacgattaactacagactgggccgtatgttcctttcctttacgctcgtcccagttcttcaagataacgaaataggtgccggaattactctgttccccgcctcccatgacagagaagccggatatgccgatataattttttacttcgggatagctgttgaggatttcattgatctcacgtccgacagcttctgtgcgttccagacttgaagcaggcggcaattgcaccacggcaaggaaatacccgtcatcttcttcgggaataaaggtactgggccacttcataaacaggatcacagcgagtgctgtaaacccggcataagacaacagtgcagcggcagggcgccggagcagccaacccacggttttatcgtatatcccttgtgttttgtcgtacacaaagttgaagccccgaaaaagtggcgactgtgcaggttttgtaggctgtaatatcaaggcacacaatgcaggagttagtgtcagcgagttgaaaccgcttagcacagtgctggcagcaatagtcagtgcaaactgtttataaagctgtccggagataccgctgacgagcattgtcggaataaatacggcaagcaacaccagcactacgcccacaatcggaccggtgatctctcccatcgcctgaataaccgcctgccgggcactgtactgctccgtgtcaagcaaacgcgtggagttttctactaccacaatggcgtcatccaccacaatggccacggcaagtatcagtccgaacagcgtcagtgtattgatggagaatccgaagagcgccatcactgccagagtaccgatgagtgatacgggaatggtgatacacggaatgataaccgcccgccagttctgtaggaaaagaaagatgacaagtaccacaagcagggttgtttccaggaaagttaccagcacttcgtctactgaagcatggatgacgtctgtcgtatccagggttacactgtaatggatgccgctggggaacgattctgacagttcctgcatcttctcttttacgcctttggatacatccagcgaattggaacccggttgttgatagatggcaatggcggcggtaggttgcccgttcagccgggatacgacgctgtaggatgcggagccaaggtcgatgtgagccacatcacggaggcgaagcactctcccgcccgcttctgttcgcaagatgatattgccgaactcttcgggagatgaaagtcgccctttcaccgtcagactgtattgataggcaggggcattgctgccggaagagacattaccaatgttggtgttacccggagttggatttcccggcagaggttgtcccacagctccggcactgacttctacattttgtgattgaatggcctggtaaacatcggctgccgaaagattacggatacgcagtgctgccgggtccagccagatacgcatggagtagtctcccgctcccatcacattgacagcgcctacacccggtacgcgcgtcaactggtcgacaaggttcagggtggcgtagttgctgaggtatagtccgtcatactccttgttttcggaagtcatggtgaggaacatcacgatgttcgacgactgcttttgaacggttactccctgtaccactaccggggttggtaatgaagcctgtgccacactgacacggttttggacttgtacggttgccatgtcaatatctgttccgacagcaaaagtaatggtgagcgaataggcacccgatgaggaggaattggaggacatataaagcatgccttccactccgtttacttgctgctcgatgggtatacccacggtttgggccactgtctgcgcgttggcacccggatagacggcgctgacctggacggtaggcggtgtaatgtccggatactgcgcaatggggagtatgcccagtgtgaccagtcccgccaccacgatcagcagcgcaagcacggtagcaaagataggacggtttatgaagaattttgagaacatgagcttagtatttagttatttacgattggttatttgttgatgggcttcactttcattccttcccgcactttcatcagtgcccgggtgacgtagcgttcctgtggcgagagtccgccggttatttgccgcagactgtcgtctatcaactgtcccacctcgatgtggcgatagcgcaccatatcggaatcgttcactacatacacatattttcccaattgatcggtaccgatggacgcgtccggtatcagtattgcctgcgattctttgccgtatggcaaggtgatactgacataaagtccgcttttcagtaaacctttcgggttgtccaggcgggcacgcagattcagagttccggtgctcaggtctacattcggtgcaaagtaatcgagtgtggcaggatacggttgtatgccgtcttcccccaggttaacagtgatttgccggggtagtgtatctttctgctgtgcggttccttgttgcatcagcatggcaagccactggttatcagtgatattgaagtatgtatatagcaggtcatctttatagatcgtggcaagggtgacaggttgcaaacttccccctacataactgcccacatcgacttgattccggctgacagtcccatcaaacggcgcccggactgtgcagtagcccagatttgtgcgtgccgtattcagtgcagcttcggcgttgctgactgtcgcttgtgaagtggcaacattcgatttcgactgtaacacctgtatctggcttacagcatcgcttttcacagcttccagcatacgggcatagttgttctgggcatattccaaattggctcgggcggtgttcagttccgcttccgcctgttctacattgtcctggtaaatagtgggttcgatgacaaacaacacctgtcctttccgaactctgcttcccggagcataggcgatggtttgcagggtcccgttcacccgtgccaccaggtcgacggtcttttccgaactcagatagcccggatactctttagtcagtgtgatgtctttcaccaccggactggctacgcttatttccggaacgggcatcgctccgcgcgctgcttcttttttatccccacatcccgtcagtaacggaatcagcgtgaggatgatgtacatttcatttttcatatatggttatggtttaggaattattactcagttctctttatatcctcctcccagtgcctggtacaatgacaccagatatagcagtgaactaccctctgcctgcgtcaactggttttcgtacgtcagtagcgaacggagtgcatccagtacattctggaaaggactaagtccctgtttataaagctccagggagagtttcagtgtctcttgtccctgatttcgtacttcccggagggcgacaatctgcttgatggaattccggtaattattcatcgcattgtccgtttcctgtacagcggtaagcacggtttcgttgaagttatgcaccgcttcgtccaattgtgcacgtgcctgtttggtggcattcaccagttttgttccgctgaacagtgtccaactgagggttggggcaatttcaaatgtcatacttttccgtcgggtcaggtctttcaaatcccgggcggcatatcctacagatcctttcaggaatacttgtggcagccagtcgcttttgctggctcccaatagtgcggcttgtgcattaaccagtctttcggcttggcgcacatcgggacgacgaagcaataaatcggcgggtaatcctactccaacaggttccatgtagtcgggcaatttcccgattctttccaatgtggggcgtatctcctgcggataagttcccagcagaatagccagcgagttgatgtattggctgattccggattccagttgcggaacagatgctttagtgctgaaatgcactgatttagcctgtgctacatccagtttcgatacaagtcccgtgttgtagcgtactttggtgatgttgagcacttcttcttgcgtccggcagttatgcattactacctgcagttcctgttgcagttcccgcaggttgatgtaggcagaagctacttgtgcacagagggatacctgtacggagatgtactcttcacggctggcttggaatgtttcccgttgcgcctttacccgttgccggatgcttccgaatatatccagttcccaactggcattgagtgacgcatcataataatgtgtgatggattggggcaattcggtggtgtttccactgctttgctggcggagccatccaccatttaaagaaatagaagggaaaaaaatactgcgctccatcctcaggctggcacgtgcctgctccatacggtctatagcggcaagtacggaatagttttcgccggatgctacgctgataagagagtccagtaccgggtcattgaatgctttccaccactggtcatctaccggtaatatctgtccgctgaataagttatcatctgcggatgccgtggtagaattagcggttcctgtggaagtagggaccgttttagagttcggaatcaccgtattcccccagcctcggggcaatggtttttccagataacggttgccattctgtgccgtgacggcagaacataggcacgataagagcagcacgctgccccaagctttaatcttcataggtttaggttgttttttgtgatacagggttcataacaacctagagctctatttgtttagagaagattggggaggttataatggggttctgacagatggatgtggattggtgtgggtgatctataattgaagaaatgaattaaagattgctggtatccttttgttagtttgctgataatcaattaactgtatttaccgacagcttactgcaagatgtaaaagcatttaccgccgtatgtaacaacctttaccgcgatatgtaaatggagttaccgtgcggggttaacaaagctatcatttggggtaaacagaattttcatgagaggaaacgactgtgcacttataaagtgaagtaagagataatccatacccctacaataatgagtttaattcaacgacttcggtagtgtatatataggaaaggacgcccctgcaagcaacatcttattgcttgcaggggcgtcctttcctatatatacaccgccgaatattattccgcagtcttttttcttctagtcggcttttcctttacctcttccttgtgttcgatggttacaccagccaattccgggtcaatcatgatacgtccgcaatactcgcaaacgatgattttcttacgagaacggatatccagttgtctctggggtgggattttgttgaagcaaccgccacaagcgtcacgctgtacatatacgatacccaatccgttgcgagagttcttacggatacgcttgaaagactggagcaagcgcggttcgatcttagtttcaagttctttggctttgtctctcagcttttcttcttcctgcttggtttcagagatgatttcgtccagttcgttcttcttaacgtccaggtctttctgtctttcgtccaacgcttctgtgctctttgcagcttcagcagacttctcctgttcctgtgcagcgaactctttgattctcttatcgcaaagctccatttccagagtttggaattcgatttctttgcttaggaagtcgtactcacggttgttgcgtacattctcctgctgttccttgtattttgcgatagaagcttttgaagtttcaatctccactttcttggtagcgatggcggatttcagttcggctacttctgccttaattctgtcgatacgagtgctcagaccggcgatttcatcttccaagtcctgtacttccagcggaagttcacctcttaaagtctttatttcatcaatcttagacaacatagtctgcaactggaacagggctttcaacttctgctccacggtcaattcctgaggatctttttttgcttctttagccattttacttataaatattttatgggattggtattcactttgcactgttgcagcgcaaggttaggaaacaactcccggattattgtatagaatatttcttttgtatattgttcgctttcgtaatgtcctatctctgccaacagaatatccgtatcgtgtccgaagtaatcgtgatacttgatttctccggtgatgaacacgtctgcgctgttgcgtatggcaagcggcatcagaaatgctccggctcctccacacagtgccacggtctgtatttcacgtccggtcagcttgttatgcttcagacagcccacttcaaaggtcttcttgatgcgtttcagaaactccaactccgtttccggtgtttccagttctccgataactcctgccccagcctgtgtccagctattctgcaaaggatataaatcgaatgcaggttcctcatacggatgggcactcagtagagctttgataacttccgatttcttataggcaggcaatacggtctctatccgcacttccttttccgtatgcaactctccgatgcttccacagaacgggtggctaccctcctgagcacggaaagttccctctccttctacattgtagctgcatgcgtcatagtttcctatgcaaccgcatccggctgcaaacaaagctttacgaacatcttccgcctgtgctgtgggtacaaaagtcaccaattttaccaaggtattctctttggcttccagcacgcgtacattactcaatcctattttctcggcaatcttgaagttcacccctcccggagcattgtccaggttggtatgtgccgagtagatcacgatatcattcttgattgctttcatgatacaatgctctacatagtccctacccgtgatggatttatatcctttgaatatcagcggatgatgggatatgacaagattgtaccctaacgcaatcgcttcgtccagcacggcttcggtgacgtcaagacacaacaaagcccctgttgcttccgcttctgtcaatccgatttgcaggccggcattatcaaatccgtcttgcaatggcagaggcgcgaaccgttcaagggcgcttactatctccttaattctcattatgtgaatagaaaatttcggtgcaaatatagtaaaaatgcactgaataactgtttgttttactctttttttatatatttgttcggataattgtaaaactctataccatgaaagtattacttttctcgtttttcgctttattatgcattcttttctcgtgccaaccctcacccaaagcccaggatggcggtgaagaggatgcacaagaggaatttgtggatactactccgaaggctacagccatcttctggatagataaacataaggaaatgcccggacaaccgtcaaagaggccgggtgcggtacgtacggtgaaagccaaagtcaatatccatttggcagggcgtatagaagtactttcgtatgtgaaaccgcagaaaggatatataaaaagttatataaatcgccgtcttgagacgttccgggtaaggaaagtgttgatggatagtgcttatataaaacccggcgtacagtatgtacagttgcgttatactcctgaaaaagtagagcattaacggtttttcttcttttcctttttctctaccattacctgcaatagttttccgttggcatcgaacgatttacgcgatgccagcgagatggtaatcatcagcgaaagcatggatgccgtgaaggttatcaccataatcatcatctgatatttgatggcgacattcgggctactacctcccaggatttgtccgatcattgtgccgggcagtgccaccaagcccataacagcaatattggcaatcaacgggctaaaagactttatgatagcctgtttgataaaaggcgcctgtgcctctgcccttgtggcaccattgccaagcagatagcgatacaattgctgttcccgtttcaatccgctgtaataagcattcagcgcaacaacattgctggatagcatgtttcccatcaggataccgaatatcggaataaaatactgggcactgaacacattttccaatcgtaatacaatggcaatgaagtacatgccgatgcagacgacactgaataagaaacctatggagataggaataaacagtattttccgtttcaattgggtgcgtgccagggcggtttgtgcggcgacgaatatcataataatcacccacagaaagttgatccacgggttattccacagaaacaagtatttcaggtagataccgataaagaaaagttgtacaatcatccgtgcgataccaatcacggtaacccacaatagccctgtcttgaacttccacaagtagaacagcggaataagcaacagcaacaatccgatggctaaactggtatatgatatgtcgatagttcccactttattaatctcttagttatagcgttatcatctggttgcatccttgcgcaaatccctggtcgtgagagacagcgaggatggcacttccctccctcattcgtttccggaagaaagcaagtactttatccgtagagtccgaatccagtgcggaagtcggttcatccacaatcagcagcggcttttgcatcaaggtggctacggcaatcatgatacgttgccgttgtcctccggagatctcattcacacgtttatcgtacaattcctcttccagccccaattcatcgaaacaggcaaatagtttgtccagtgaaaagggggtattcctgttagctttcagattgaaagggagttgtaccatttccttcacccattccgatggaagcgccagttcttgtggtatccatgccacttgccggcgaatttggtcgatagttcccttttccagtaaaatgccgttaacggtgatgctccctgctttgaggggtacaaatcctaaaactgcattcagcaaggaggtttttccccgccccgattgtccggaaatgcaggcgatttccccttcgtgcagctgtaagcaaaaaccggaaaaaagcgtatctgctccgaaagcgatgcatgcgttgtctatttgaagtatagtcctggtctccatttgaaagcaaatatagaaaggaattctgagaaaacgacggattattggctgaaatcagtatctttaaataagataagctgcattttggcataactttttcatgcaagcatgaaagttctgcactcaatttgcattatctttgctatcagtttttaataaaagtgagaattatgatacagaacgaacgtgcaagccgccacgaacatgtgttggacgtggcaaggcagatgatgactgctgcccgtaccgctccgaagggaaaaggtgtagatataattgaaatagctatggtcaccggagacgatttaaaagtattgtcagacaagatggttgccatggtggaagaacatggaatgaagttctttttgcgggatgccgccaacattttgcaggctgaatgtgtaattataataggtacgcgcgagcaggcgcaaggattgaattgcggccattgtggttatcccacttgtgcgggacgccccgaaggtgtgccttgtgccgtgaattcggtcgatgtaggtatagctatcggttcggcttgtgccacggcggccgatttgcgtgtggatacccgtgtgatgttctctgccggacttgctgcgcagcaattggagtggttgccgggatgcagatccgtgtatgctattccggtcagtgcttcgaccaagaatccgttctttgaccgcaagccgaaagaagaaaagaaagaatgataaatatgagtgatacgttcaatgctgttttgcctgccgaatgggcgccgcaaagcggaatacagctgacttggccccatgccggaactgactgggcatatatgcttacggaagtacaagcctgctttgccgctatcgcacgcgaaatagcccagcgggaattgcttctgatcgtaactcccgaaccggaggaggtcaaaaagcagatttcagctaccgtcaatatgcagaatgtccgtttcatggagtgtgaaacgaatgatacctgggcgcgtgatcatggtgcaattaccatgttggattcagaaggcgcttcgcttcttgatttcatgttcaatggctgggggctgaaattcgcttcggataaagacaatctgattacccgtcaggctgtggaagccggtttcctgaatgggcggtatgttaatcgtctgggctttgttctggaaggtggttccattgagagtgacgggttgggcacattactcaccacgtccgagtgtttgctttctctcaatcgtaacggacagatgagccgcgatgaaatcgaagactatctctgttctgtatttcatctgaaacaggtactttggctcaatcatgggtatttggcaggagatgatacggatagtcatgttgatacgctcgctcgtctttgctcaccggatactattgcctatgtgcaatgcaccgatacgcaggatgaacattacgaagctctccatcaaatggaagaacaactgaaaaccttccgtactttgaatggaaacccctatcgcctgttggcattgcctatggtggacaagattgaggaagagggcgaacgcctccccgcaacgtatgccaatttcttgataatgaatgatgcggtgctttatcctacttatcgtcagccggagaatgaccaacgtgctaaagaagtcttgcaggaagcgttcccggaatatgagattgtaggcattgattgccgggcgctgattaagcagcatggatcgttgcattgcgtgacgatgcaataccctgccggtgtattgaaataaaattagaaagatatgagaaaaataaaagtcggaattattcagcaagccaatacagcagatcttcgtacgaacctgatgaacctggctaaaagcatagaagcctgtgctgcacatggtgcgcaactggttgtattacaggaactgcacaattccctgtatttctgtcagactgaaaacacgcaactgtttgatctggcggaaaccattcccggcccttccaccggattttattccgaactggccgctgccaataaaatcgtattggtgacctccctatttgagaaacgtgccccgggactctatcataacaccgctgttgtttttgatcgtgacggaagcattgccggaaaataccgcaagatgcatatccccgacgatccggcctattatgaaaagttctatttcactcccggagatataggttttgaacctatccaaacctctctcggaaagttgggtgtacttgtttgttgggatcagtggtaccccgaagctgcccgcctaatggcattgaaaggtgccgaattattaatctaccccaccgccatcggttgggaaagcagtgatgccgatgatgaaaaggcacgccagctcaatgcctggattatctcccagcgtgcccatgccgtagccaacggacttcctgttatctccgttaaccgtgtcggtcacgaacccgatccgtccatgcagacgaatggcatccaattttggggaaatagttttgtagcaggtccgcaaggagaattccttgcacaagccggaaacgatcgtccggaaaatatagtagtggagatagatatggaacgctctgaaaatgtacgccgttggtggcctttcctgcgcgaccgtcgtattgatgaatacggtggattgacgaaacgcttccttgattaaaatgcaatttgataaaagcgcagcaaaacgcagtttgataaaacgttaacggaacgtgattttcctgttcattataaaattcacacctccgtagataaatagtcccaggaactgagccaggtattcatcacaattcaatgcctcgaccaacactaccagaaataggaattgcgccagatatgccattccgaaagcgatagaaaagagcaacacctgcctccaggtgttgctcttcttttctttatcatccaaaggaaatatccagtgcttgcaccagataaaattatgagtctgcgcaatgacgtaagcagttatgttagagagcatatagtcgatgtccagttcatccatcatcagccagatgactgctgctataatcagggcattcagcgtaccgattaccgcaaaacggaagatgcgtctcgactctctcacaacaaactaacctactcttattctttgatatctacgatcaaattcagttcgtccaactgagacggatcaagtgctgcgggagcatccagcatcacgtcgcgtccactgttattcttcgggaatgcgatgcagtcacgaatactatccaatccggcaaagagagatacccaacgatcaagaccatatgccagaccgccatgaggaggtgcaccatatttgaatgcattcatcaggaatccgaattgttcttctgctttttcaggagtgaatcccaggatttcgaacatctttgcctgcaacttcggatcgtggatacggattgaaccgccaccgacttccacaccattgattaccatatcataagcatcggcacgtactgctgccggatcagtatccagtaaatcaatgtcctcgtctttcggatgggtgaatggatggtgcatagccatcaagcggttttcttgctcactccattcaaacatcgggaagtctactacccacaggcatgcgaatgtgttcttatcacgcaatcccagttggctacccatttccagacgaagctcgcaaagttgcttgcgtgtcttcatggtgtcgtcgccgctcaaaatcagaatcaagtcacccggttttgcaccgaaagcttctttcacctgttgcagtacttcctgcgtatagaatttgtcaacgctcgattttacacttccgtcttcctctacacgggcgtaaaccataccttttgcaccaatctgcggtctcttcacgaattccgtcagtgcatccagttgtttgcgggtgtagtgtgcggcaccttcggcacagataccaccgatgtattcggcactatcaaatacagagaagccatggcctttcagtatatccatcagctccacgaacttcataccgaaacgcaagtcgggtttgtcgctaccataatatttcatggcgtccgcccatgccatacgctggaactgaccttccaattccacaccgcggatttctttgaacagatatttcgtcataccttcaaacaggttgatgatgtcgtcctgttctacgaaagacatttcgcagtctatctgagtaaattccggctgacggtcggcacgaaggtcctcgtcacggaaacacttggcaatctggaagtaacggtcgaaaccggataccatcagcaattgcttcaaggtctgcgggctttgcggcaaagcgtagaactgtcccggattcatgcgtgagggcaccacgaagtcgcgtgcaccttccggagtagagcctaccagtacaggagtttccacttcgatgaaaccctggctgtccagatagcggcgtacctcaatggtcattctatggcggagttccagatttctgcgtaccgatggacggcgcaaatccagataacggtatttcatgcggatatcgtcgccaccatccgtattatcttcgatggtgaacggaggtgtcagggctgcattcagcacattcagttccgatacgatgatttcaatatctccggtcgggatattggcattcttgctgaagcgttcgttcaccgttcctgtaatctgaatgacgaattcgcgtcccaggcggttggcgttctcgcaaagtgcggcgtccacctcttcgttaaaaactaactgggtgataccgtaacggtcgcggaggtcaatgaatgtcatacctcccattttgcggctgcgctgcacccaacctgccagcgttacttgcttattgacatcggagatacgaagttctccgcaggtgtgtgatctaaacatgttgataattactaattatgatttactaattacaaattggctgcactgtaatggttgcaggccagttgctaatagtctgcaaaaatacagatttattttataaaaaactcagattttcgttaacttcttaatctgctctttactcttatccaatatcatcttattcttatgcacaatctcctcattgatctgcttcaggccatttatataatcctgtgcccgttgcaatacattcgaagagtctttttcggcatatcgggggatgattacctgcaatccttctttgattacctttacgtcgatgttttctcccatcatcatcgggtccccgtcaaagtgcactactcccggtttggtacggtggatgcgcagcgtctggcagcggaaagttttgatgcggctattttggtctatagtcttattaaacagttggaaagacagggagggcacatccagcaccgtgaaaggttcaaggatggtcacgtccaataatccgtccgtcagcatggcctgtggagctatgtacgcattgtttccgtattgcgaagcgttgccgcaggctatcaggaaagccttatactttaaagtaccgtcttccgtttccagttcgtaagtttcaggctgatacttcaagctctccagcagagtcttttctaaataggtaagagggcctctcctgcccgcctttgcaaacttcaggctgacaaaagcatcaaaacctacaccgcaggtacagaagaaaggcacttcattgatttttccgtaatcgatgacgtctataattccttcgttgatgatttctatcgcctttttgggctccatcgaaatttgcagatggcgtgccagtccgtttcccgaaccacacggaatgatgcccaatgctgtttttgtatgcaccagcgaacgggctatttcgttgatcgtaccgtcaccgccaatagccactacagcatgcacattttcctttgctttttgtgcagcaatttcaacagcatgtccggcatattcggtatagattacctcctgggcatactttgccttatccagcttttcatcgagcaaatggaggatttgctctttgttctgcgtaccggatttcggatttataatgaatgatattttctttttttcttcgtccatgcaagggttctttcactatgcaattttataaatggcaaaagtaatacaaatacttgaatttttaaccatagagtgggctttaatccatgggcaaatatattttttagtaaaaaaagaacagataagcacatattttgctatctttgccccctgttttcaaaaggcttgtaattaagagttaaatatttcatattatataataaacatttcatgggattactacaagacaaattggcgaaatacgacctgccacagcaatatatggcaatgggcgtatacccctatttccgcacaattgacagccatcaggatactgaggtgttgatggatggtaaaaaagtcctgatgttcggttcgaatgcttatacaggactgacttacgataaaagaataatagaagccgcaaaagccgccacagataaatacggtacaggttgtgcaggttcccgtttattaaatggaactcttgatatacatgtagagttggaaaaagaactggctgagtttgtcggaaaagacgatgcactctgtttttccaccggatttactgtaaatgagggtgttattccgcaattgacgggacgtaacgattacattatctgtgacgaccgcgtgcacgcttccatcgtagatggccgccgcctctccttttctactcaattgaagtacaaacataacgatatggccgatctggaaaaagaactccagaaatgcgagccggatgctatcaaactgatcgtggtggatagtgttttctctatggaaggcgaccttgccaacctccccgaaatcgtacgtttgaagaaaaaatacaatgccagcatcatggtggacgaagcacacggattgggtgtattcggaaaacaaggacgcggtgtttgcgatcatttcggtgtgacggatgatatcgacctgattatgggtacgttcagcaagtcactggcttctatcggtggtttcgttgccggagatgcttcggtaatcaactggttgcgccacaatgcccgttcttatatattccaggcaagtaacacgcctgctgctacggctgctgcccgtgaagctcttcacatcattatgaacgaaccggaacgtcagcaacgtttgtgggacatcaccaactatgcattgaagaaattccgtgatgccggtttcgaaatcggtgaaactgaatcccctatcattccgctgtatgtgcgtgatgcggaaaagacatttatcgtaactaagatggcgtttgacgaaggcatcttcatcaatccggttattccgcccgcttgtgcaccgcaagacacgctggtacgcgtagcattgatggctactcacaccaaagagcaggtagactatgctgttgagaagttgacgaaatgtttccgtgaactcggagtgattgaataaggattttcctgaaatcagataaaatgcaaagagactgtcttcaaaaggcagtctcttttttttaggaattgataaaattatgtaagtttgtagcagaatactgaattcctattcaatgaaaaacatcattaacaagatcaggcaagtttatccggtttccgacgaagcacttcaggcacttcaggcagatatgcaggtaagatattaccctaaaaatacttatatagtgcactcgggggtaacggaccgtctggtttattttattgaagagggagttgcccgttccgtatttcatcacaacggacaggataccactacctggttcagtcaggaaggcgacattactttcggtatggattcgttgtattacaaacagccgtcagtagagagcattgaagctctttcggattgcaaaatctatgtcatccatatagacaagctgaatcttctttacgaaacgtacatcgatatagccaactggggaagaatcctgcatcagaatgtaaataaggagcttagccacatgtttgtggagcgtcttcagctttcgcccaaggagcggtacgaacggtttaaccggcgctatcccggattgataaaccgggtgaagctgaagtatgtggctgcttttctgggtatttccatttatacacttagccgggtgcgtgcccaaaaataagtattcgccggtcttttttgcttttgagcaaaaaaacttcagatggcaagctgtatctttgccatctgaaaatattaacttaatactaagaaacaaatgtctaataccccctcagcagcattttcggataccaaggcgcattacgatcttctggacggacttcgtggtgtagcggcccttatggtgatatggtatcatatattcgaaggctatgcttttgcaagcgataccatgattacaacgttcaatcatggatatttagccgtggattttttctttatcctttcaggtttcgttatcggctatgcctatgatgaccgttggggtaagagtcttacaatgaaagatttctttaagcgtcgtttgatacgtcttcatcctatggtgataatgggggctgttctgggtgctattacattctgtattcagggttccgtgcaatgggatggaacacatatcggcatctccatgataatgctgtctctgctctgcacgatattctttattcccgcaatgccgggcgtaggttatgaagttcgtggcaacggtgagatgtttccgttgaacgggccttgctggtcgttgttcttcgagtatataggtaatattctttatgccttgtttatccgtcgcttatccaataaggcgctgactgtgctcgttgtattgttgggagtggcattggcgctattcgcagtcttcgatgtttccggttatggaaatataggtgtgggctggacgttggacggggtcaactttggcggcggattattgagaatgttgttcccgttttctgtgggtatgcttatgtcgcgtaacttcaagcctatgaaggtgaaaggtgcgttctggatatgtaccattgtattgattgctttgttctcagtaccctatctggaaggtgcggagccgatttgtacaaatggtgcttatgaagcattttgtattatcgtagctttccccgcccttgtatggataggagcatcgggaactactacggataaaaagtcaactcagatatgtaagttcctgggagatatctcgtatccgatttatgtgatacattatccgttcatgtatctgttctatgcatggctgattaaaaatcaactctttactttgggagaaacctggcaggttgctttatgcgtttatgccttgaatgtagtgttggcttacctgtgcttgaagctgtatgatgagcctatacgaaaatatttggctaaacggtttttaaagaagaagtgattacgccctttcagggttcaggtcggggctgagatcgcgatgccccactactctagtacacattatttttcataacctttcattttcaatataattatgggtcgcatgatataatctttaagaaaggaagcattatagtataaactggaatcttgcctgcaatacactaaaattcttgtcgcttatctcccgaatgtgttttccggggattacatagctgtagtttactttaatccctatatgcttgtttatgtagtaattcaatcccagagaaaaatccttttgtgctccgcctaatacttctgcagtccggttgttcatatctacgatattgaaacgtccgcagagttcgagcgcacgacctatagggcgggaaggacatgccggagctgcatcatagtcataagtatttcctatcaggagccacgaacattgcgcatatccaccctgtccggtatagtcggcaagggcattcctgcgtttcacttgagtacggatatattcgctttgaaaggagaattttccgtaatagatcagcagttcagtacccagcttcacttgatggcgggcattatccacttccgcataaatcaggttacgattgtcgatagtactcactccggcagatttatagacaaaggtattcttgttatcatcatccggcaaagcaccatcgggagtgcgatagatagcggcaataccgagatgcaatagctttccagcttcatttacaggtcggtaaacaatcctccgcaagcataataatgcgtagcattgtaagtgtaggcaactcccagacgccgactgttggtcatggcaagcacagagccgggtgactgatggaaacgtaggtcgaaagtgctgcaaagcatatccatggtgaaaggttcgtagaattgccctacctggatgatatgcttaccggaagtgtaagtagcgaaagcatctttgatagaaaccttgctgcctacatagcctatttccactttcatgtcccagcgctggtaagtggccttcatgcctacgcgcagatcattgaattccgtaccgttaccgaaatgattgtcattcctgagataaacaccgccatccataagcatgcggccggttactttgtactgtaatttgtcggagagagtttcctgtgctgtggcggtcaaagaagtgacgaccgccagcaggcacagggaggatttagaaaggtaattcattagtaagaagtttgttggactacttctatcagacgtgcgaaatcttcaggatgtacatctccgatgttgccgatgcggaaagtatctgcctgggatatcttgcccggatagatgacgaaacctttttctttcagttgggtgtagaaagagttgaaatcgaaacctgctttcggataaaggaaagaggtgatgatgggtgactggaattcgtccggcagcaaggttttgaagccgagtgcgcgcattccttctaccaatatgcggtggttttcgcaatatctcttgtggcgggcggctactcccccctcttcttccagttcggcaagtgcctgcttgaaggctcttactacatgggtgggtgaagtaaacctccatttgccatgtcctttttccatcgtctcccattggtcgtaaatatcgagtgagagtgaacgggaaacacctttgctgtgtaacagttcggatttgcgggctatgataaaaccgaagccgggaacaccttgaatacatttgttggcactgctgatcatgaagtcgatacctaattcatacatatccaaaggcacgccgccgaagctgctcatagcgtctacaatcagctttttgttgtggagcttcacaatgtgggcaatctctttgagagggttcaggataccggtagtggtttcgcaatgtactacggctacgtgggtgatatctgaattgttggacaggtaatcgtctacatagtcaacggaaacctgttcggtttcttcgaaagcaagcatatcgtagttgatgccgtgatattcggcaatgtggcccatacggtcaccataagcgccattgctgaggataagcagtttgtgtttgggagtgatgacactgccgataacagcttccacgcaataagtgccgcttccctgcaagagtacggaagtgtattcgtcggtagctgtagtagcaagggcaacgagggatttgcggatttcttctacaatgtgtacgttatagtcggcgtcccatgtacaccaatcggtcatcatggcttcttttacggtttctgacgtggttaatgggccgggggttaataataaatagggtttcatattggtttgatatttaaaaggattaatgattcgtattcagtttatgattgataagctctatgatttggggaagctcttcgatgctgtccaccacatagtgggcgcccgccagaagcatgcgctgtctgacttctgctttccgggcagtgagcgttgcgggagacatttgttctacttcctcctgggttagtcccagttcgttactgccgagtattacgccgacggtccagactttggcattgataccctctttgatgtcggcaatggtgtcaccgtacttcagaacacagtctgttgaagggacggcaagatcgatcatgttttggtaaatcatataagggaaaggacgtccggcaggcagaccgttgggagtgacacacttgtcggtggtgtaacctttgcgggctgcattggggagcactacgtccatcatggcttgggtgtagccggtggtggaacctattttgatgccttgttttctcagttcactcagggtatcaatgactccgggaatggggtcggtgtagtttgccagggaagcaaaaaggtattcctcaaatttggcgttcatatctattacgtcctgttcgttccaggggcggtgatagagtttctcaaactcctcgcctactccgtccatcttgaacagttcgcggatgtggtctatcttggccattcccatagggcggcgggcttgttccatcgtgatgttgatgcctatttcattgaaggctttcaggaaggcggctaccggagcgaaacatccgtaatcaactgcagagcctgcccagtccataatgatacattctattcttttcatgtttacttgttattttataatgagttgtttaataataaattggggtttatctatttttgtaagccttttaggctacctgcaaaacttgaattattcatctgttgaattattgcttattgcgataagatgttcttatttctcttacttttttagctgggtatcacagaaaatgcagattgtagcatttccggtttctcttctaccgcacgtcccgtgcgcaggagttcttctttcttatgtctctgcaccaggtagacaatagaacagctgaatgctacggtacagattattcctacataaccggacatctggttgtaaaaatcgagccaattgatattcgtattaaagaattccttgaacatcaggacgagtacggtgccggtatatccgatgaaatcaatcgtcacaataaagaatcctacattcccttttatcttgaagcatgctatgaagcggtcgaaaaatatgctttgaaaacaaaggtaggcaatgtaaaggctcagactctggatgaacaaccaagtcacggtgctgagttgaagcgtatcgtaattgagtgacacgaaactcatggtagccgttccggcaaccaccatactcaagaggatgaccaatactttgatattactctttacaaagaccatcattccgaaaagtgccaggatgataagagtaacaacactgtctatttgtgcaaacagccaggaagaatgtccgctcatgtcgataatcttcaccaggaaatcttctttaatatcccggaggataaccaacagaaggttggctacgaacaggaggatcaatacaggcatgaagttgcggaacagttctttgcgttgttttccgttgagagtgacacgctggctcttttcggcaatgtcttgttgggtgggttgcggcaggcgattcagggtgtaacccagcaaggcaagcaatggcagggcaaagccaccgatgagagcgggcatccagaactctcctacatgcagggtgttcataacgaacagtccgatagattttgccacgccggagctgatgacaatactgatacccaaaaggctggcaagaatatcggtggtgcgtctgccttcgatgaagctgaatatcacgccccacatgcaacccagtgacaaaccgttgaagaacatggcgaagatattataaggagcgggcaagagtccgaagagaaccagggagagttccgctaccagaatggaagccaggatgaacttcatgcggtgctccttctttaattcggaaatcaacttgataccgacaaacttggcgatgaggtagcccagaatctggacgatggtaaccaatactttataatccaatccgaaggcatccagtccgtcgaaggaggcagcggtgaaaggtttgcgaagcgcatatactaaggagtacgaaagaagcgctgcacctcctgcccaaagtatgaatacaagatcggatattttcttgtttgaaagtagttccgttttaatgtcggtaattgttttcattttattctcttttgatttcgagggcaaaagtagaaggatgatgttacagaaaaaatgaatatttattattaatacatttaattatcggatagaaaataaagtaacattaatgtaacatttatgcaatcggaatataacacaagtgggtgttctttgcaaattaaaaaccaaaaacacttacaaaatatggaggaactattagagatatataagcggatagaagatctgcgtaataaaggggtgaaaatgaaagatatagctgacaaaacgaatatgcccgccagtgtgctgtcttctctctattcaagtgtgctgcccacctttgcaagatcggtaaagaaaggaatgatggaagaagaagcattggactatgccctgtctcaggtgaataatgtttcgaagaaacgtttgctcggcaaccttactgaaatgaaagagcagttgctggaactggaacccgtgacaaccggtaaccagaaggaaattccattcgtcagaatgttgaccgaagagatgaatcattcggcacaggaagtgtataattatagtggtatatatataagttatagtctttcgtcttcgagtgattgcctgaagatggaaccgtatctgattagtgcctccgaaaacaatgactatgtacaggtgactcatatgagcgcttacaacacaacgcaccgggggatcgggttgttaaataatcatcagaatgcatatatcatcttcaacgaaagggaggctccgcagcttgcattattcaccatctatctgcaactgcccatgtacgactatccgtctatgctgaaagggctttacctgagtctggactataaccggaatccaatagcccggcggattgttttcgtgaaatattccgatagcaccagcatggatgattttatagaactgaaaggcggactgctgaccgaggaagaactgacaccagagcaaaaggtctattttgaatatacatgccggggcggggattatataaaaacgtgtacggtgccctcccctcacctgaatggtgacgatctggaaagggagaagaagatgctgaaactgtgattctgctaataagaatagaacgacggtgtgtcttttgttacggttttacagtttttcttatcatcttgctttgatattgaaagttttttagtatgtttgctgcattattaatgaaaaacacgtcttttcaatgaaaaagcaagatttcctgtttattattctggtggtggtagtctttctacccttctttttgagtgacgcggtttatgactggtataagtcgttcaatgctgcacatggtatggtgatgagctttttgaagtttgccattctgtcttcgttgggcgaagttctgggattacgaatcagtgcgggagtgtacaaccggaagggtttcggtattattccgcgcatggtggtatggggcatactcggtatgggaatcaatgccgctatgattatcttttcaaaaggtgtgccgcagttcatggagtatatgggaatggcaaatgctgctgcaacgtttacaagtgaagcgatgtctctcgataaggtgctggtggcgctggccatatcggtaacgatgaacacgatctttgctccggtattcatgactttccataaaataacagatacgcatatcctgatgtgcggcggttctattaagagtcttatcactcctattccgatgacgaaaatcatcaccggactgaactggaacgttcaatggaacttcgtttttaagaagacaatcccgttcttctggtatcctgcacacaccattactttcatgcttccaccggatatgcgcgtattgtttgcggcattgctgggcattatactgggagtattgctggcagtggcggcacggaaatagtttttttattacctttgcttcctgctaaacgaaaatagatgtatgaaactatatagtaagcaggaagcaatcgcacgcatgaatatgctggcaggctgttcaaagtcgtttgtctttctgattgattattcgcaggaacaggtttatgtggaagagacggcagaggtctcaccggaggagttgatatataacctgaatggatttacgaatgaagcagttgccggtttaacggatgaattgttttcggagagtttaccggaacagatagaatggacctcacagcctgtttcttttcaggaatacagtcgtgctttcggacatgtgaaaaagaatattcttgccggaaacagctttcttacgaatttaacttgccggactccggtacaaaccaatctgactttaaaggatatatattgtaactcccgtgctttatataaagtatgggtaaagaatcgttttgtagttttctctccggagattttcgttcggataaagaaagggattatcagctcttatcccatgaaaggtacgatagacgctaccctgcccgatgccgtacaaaccttgatgaacgacgggaaagaagcggcggaacatgctacgattgtggatctgatcaggaatgatctgagtattgtggcgtctcatgtctgggtggagcgttatcgctatatagatgtgttgcagacaaatcggggaccgatattgcagactagttcggagatatgcggtgaacttccagaagattacaaacggcagttaggtgatattcttttcagtatgttgcctgccggttctattaccggtgcacccaaaaagaagacgatgcagattattcgtgaagctgaaggatatgaacggggattctatacgggaataaccggatatttcgatggagacaatatggatagtgccgtgatgatacgttttgtggagcaagaggcggacggaatgtattttaaaagcggtggtggcattactttcaagagtgaagcccgcagtgaatatgaagaaatgaaacagaaaatatatgtgccgatttattgaaacgatacaagtacgtgacggtaagttgcagaaccttgcccatcacaaccgtaggatgaatgagacgagacaggcggttttcggaatggcggatcaactggatattctggattatacaggggattgccctgaaagcggtttttataaatgccgggtagtttatggcagagaagtatgtgaggtggcattttccgcttatacaatgaggactgtacgttcactccggttagtcggttcggatacgattgattatcgctacaaaagtacggaccggaaggaactggaagcattgtatgccctgcgcggcaatcaggatgatgtattgattgtcagaaacaatcttttgacggatacttccattgctaatgtggcgttagaaaaagagggagtctggtatacaccgaggactcccttattgaaaggcataaaacgtgcattgctgttggaacggggggtactgacggaatgtgatattccgtcagatgagattttctcctattcacacatcgctttatttaatgcgatgattgatttccagtctctggttctggagattaaccgggatacagttattcgtatttgatactatctaccggattatttcttgctgcccgataactgttcaggcatactgtgagcagggtgatacaaacagtgaagaccaaaggaagcaggaaatgaaggataccaatgtgtacatggtaagcaaattgttgcagccaataattcatcagatagcaaaccaagggtacaatgagtataaacgctatacctatgtagtacaggaacggtcgattgacaagccataatatttgcccgaatgatgcaccgtgaatcttccgaattcctatttcgcgtatacgttgctggatagcataatgggtgatgccgaacaatccgaacagtgtgaggaataaactgattgatgcatacatcagcaggatgcgggaaaagtcggtgacttcctgattattggagatcagtacctgataagggtcttcataattgaatggagtaccggggtgtttcttctcccataatccgcgaagatgattgataactgttgtgcgatcttgttcgtcaaactgtaaggtcaatgtggtatagttatcttgtggcatttcgtgcagaatcattctcagtggaaacacattgtttgtgagcgaatatttcttgaaatctttcatgacaccgataatagtacctttctcactcttttcgggcacgtatttagagatcggttgtcccaccggatcttctccttcgggcacaagatagcgaatgaaggactcgttgatgatgaccggcacagaggtacggagtaataaatggaatgtttgtttggcatccagcaagtcgaaatcgtatatatccaggaagtccggacagttttcataaagttcaagcatcagaagatcattcttctcaccattttggcggggaacggccatactcatggtataaaggcctgattgagaagatacaacagacttcactccggggatggatttaatgtcttctatccaagtagataaaggggattgccgggagtcgccgattccaaactcaacgattcctttgtagcggcttccctcctgctctatcaggtccatttggctacggatgatcataaaagcacttagcagtccgatagaaatcataaattgtaaggtgaccagtgctgctacaatgcgctgtttcttacgacctgtaaagaagctgcggtaacggctttcggacaaggtttgtatcttccggctcatgtattctgccggaacaacggatagaatgatgacaaacagcaagataacagggaatacctgaacggagaaaagataggagaaggacagatgcgcggatattgttgcattgaatactgctaacaggtcgctcatcaacagaatggataacaagaacgctgtaatcaccatcaggaaagtatcggcaaagagttgccaacggatttgacggtggcttgcacctaaaaggctttcaatgtgcaaggtgcgtatttgcttcaataagcgtgaaaaactgaggttgatatagttgaagcaaccgatgaacaagattaataaagcagatagcagtccgacgcttaacagggccttttgccgatgctcgatacactggttgctatcttgtgtggtagtggtaaaataggattcctgtaaagtctgggtatgataataccctttgcctaataaagtaggaagctcggttgtctcgaagcgttggcgaaaggcgttgaggtctgttccttctttgagaagtatcgaacaggtggttccttcgggactttttagatgcgtgagcaagtctgcctgcaacatgctttgcgatggcagacggaagacggcggcgatacggtaggcactttcgccggattgagggatatccagcagcttgccgaggcagtcggtggtaccgaaacaacgttcggccagagcttggctgatggcaatggttcccgggtgagtcaatacttcttctatttttcctgcaagggttttgatggggataaacttgggcaatgtactgtctgccgataacaggttcagttcggaatattcttggtcgcccacacggatttttgtgtgagtgatagcttgtgtgcgtagtgaagcttctatctcagggaattgtgagatgatttcggggacagattcgtggtatacgaatgttccctgcatttcttgttgtgcgaaaggtagtgtttgtgtcagccggaggatacggtcacggttggggttgttatactcgatgttgtattcgtataggacgaaggctgtcagtaggttggtgcaggcgataccgataaccagactgacaagagaaatagtgacgaacaatttatttcgccaccagctacgcaggacaaacttcagaatgtacatgtttaatatcttgatatgttatttgaaaagtaggtcaatctgttacccttgtgtcaaaagatgtcttctcttgacacaagggtgtagagatgagattcttcgattttgcccaggatgacaggaattggcagagtaaagaagcgtttacagactcacctctgtcaccacctgtccgtcgaacagattaatgatacgtcctgcaaaaccggcatcgtgctgtgagtgggttaccatgacgatggtcgttccttctttgttcagttcattcagcagttccatcacttccttaccgttcttagagtccagattaccggtaggctcatcggcaaggatcagctttggattggctactacggcacgggcaatggcaacacgttgctgctgaccaccggagagctgctgtgggaagtgtttgcttcggtgtgtaatggccatgcgttccatggccgtttccacgcgacgtttgcgttcggcggaaggaatgcccatgtagagcaacggcagttcgatgttttcgtatacgttcagttcgtcaatcaggttgaagctttggaatacgaaaccaatgacacctttacgcaggctggtacgttgtgcttcggtgtatttggagacttcctttccattgaggtagtattctccgcccgaagggttatcgagcaagccaaggatattcagcaatgtagatttaccgcaaccggaaggtcccatgactgcgacgaactcaccttctttcacttcgatgttcacattgttcaaagcccatgtttgcacttcttctgtcttgaagattttctgcaggtttactgttttaatcataatggtgataattttaattagtaatattgtttattcgttttttattatctcggccggattgatatgcatgatccggtaaattttgtatgcggtggtgaggaatatcatgaaggccacactgaagaataacagaattccccaatcccagccttgtatacatttcactgtaccttcgcctattgatagcagcatcagtcgtaccaaaggataagcaaccgcaaaagccagcaggaaaatcaccagataagctttaccgaatataccggcaatgatccacggggtagctccgttgattttacgaatggctatttccttttgtcggctgactgtgtccatggagatggccgaatagatgctcagtacaaccaatagtatacttacaacggccaggattgtcatcgccacttgtgtcatatacatcgatcccatcatcgtttgtttattatcagatagggagcggatttcaagaggcaaggttgtgggtacgtagttacgacagatatcagtgatgtgccggatacttttggtagcgtttgtacccggcgccagcttgacatagaaatacctgaaatggttgctggggaaaaataccgaaccaatggttcctcttccctgagtttctttatagagttctttgaaagtaccgatgatgcggtaactctggccctcaatctctactctatcttgcacgttgtccttatccagttgctgtctgaaggcctcactgacataaacggtaccttctgcatctccattcacttcttttccttgcaatgggatgttcaggaatttaaagtaactcggagttcccattgctatgtcaatcatgacctccgattggtcaactttcttataggtgcgcataaaatgatttccactttgcaaatcatctgtcatggtcagtgtctctatacactccggcaatgcttgaatatcagataatatagggtttatgtgctgccacatacgttggctgttcaccttcagggaaatgatattttcttcttcttcggatgtaagcggattgtatgcctgaccgaacacttcgtgccacaccatattgacgccgagtgtactgcccacaaagaaaatggcaatacctaactgcaaccacatcataattgaacggaaaatatgacggctacggttattgttgatttggctgattatgctcacttgccgtaaacggcggataggaaaccatattacgagcatacatatcatcagaagtgcaatatatatttgaaactgtacaacgtagatagatgacaagggtaaatcgggcatatcatggcttggaatgtatatttccgcaagatttatcatgagttccgttaaaaacagagataaaagaaatgcggtggacatcatccaaaatacttcagcaaaaaggagcaggaacagtccttttatctcggatcccatacatttgcgaagcgccacttcacgctgacgattatagaacatctgaatgatgaacttaaggaaattaatcagccctgaaaccaggataagtgaggctatgaatagtatcagaaactgcaccattgtcagttctttgtcctgccgcatactgaacgcggcgtaagggtgtacggtgtcctcattccgttgccacgttatggactgtagactattgtttagcatttccatagttgccttaggcgatagataaccttgtacactcaaggcgtcataagtcatgatttcataggagaaataacaatcgattttggggtcttgcagtccgttatcttccactacattcacgactttaaagctctgtattgtattttcagctatactttgtgggttagcaaggcgtatggttgttccaataggatttgcagtgccgtatgctttacttgcaaatttattggataataccacttcatcaggtgcttcgggaagtcggctgccatgtagcaattttctgttgttataggagaaaaagttactgttaacccctctataacctatcagaaaaggtaagttacgttgttcgttatcgatgacttctatttccgttgaattgttaaaggattgtatggtcaggcattctaaaccactgatagattgctcttccagtcgttttatttcactggttcgaaaaagagaattttgtttctggttgactgttattcttatccgtcgctcgctgtcaggtaagttttcaagtttggcccattcctgcatgaaaaagcatacaatggtatagcatacgattcccaccgccaggcaaagggcggaaatgaaactgtgagtcttgtacttcagcagatttcgtagagcaactttcaaataatgtaataccattgttcttattcgtttttaattacctccgccggattcgtttttgctatccgcaagatacggaaaagtattgtaaagcctgtaataaaagtaacaatcaagaatatacagagccagaaaagcagaccgcaatcaaagaataccgtatacatttgtttccataacattaatacaacatatacaagcgggaatgcaacgatggcactacataataacaagataatataaagacgggcaaacaacaggataatctgcggaacatctgccccatttactttacggatagcaacttctttctgacgtcgttctgtatcgagcgtgatgctggagtatacacctaatagtgtgataataatgctgataacagcaaaaaacaaaataatgtccttcagattgtactcaagagcctgcaaaacatggatatcatccaggaatgttttagcctgataagttatattttctggaagcatctcgcggtagactttctcaatccatcgggctacttccttttgctggcccggatgactctttatgtaacaatggcctatgtagactgaaggatcataaggcaggaaagcatatccactacttcggttatatacattggcctgaaaaggtgcggatattccacagattgtgtagtcggtattaccgctatacaagttcataccgattacatctttcttctgcatctcctgccagagattgtctaccacaatatctttttccgtttgaggaagtcttccttgttctatgggaatattcataaaagagaagaaattggcgggtacagccatgacactaatatcaatccaggagttctcatttcccttttcggtcgttaatccattgcccgacattccttgcatataaccaacatctgataacagaatttctttcactccggcatgctgtttaaaacgctctatcaacgccaacttttcctcattcttcataaagggatagtccagaggaatactaagaatctccgacttttctttttgacttagcgtatggattaaactatcggtagttttctctgcttgcagatataaagcagctgtcagggatacaaatacccagcaaataaagaactggatacccagcataaggttacgtccccattgcttacctctgcgtttattgtttccataaatacctgtttgcacggtaatacgacgaatacgaatggaaacagacaaacatataaggacgcagagtatgataagaagaacgatatattgcagagcatgtattaaaagcgtttcagaggtaaaagtcattgcaaagcccggcaaagagaaattcatgtgattccccaataattctatgcctgataataccaatatggaggatatggatatgacaatcaatgactgtgtgaatagtaaacagaagagttgtttccagttgcatcctatcattttcatgatactgtattctttagtacgattgaagaaagaaccgataaggaaatggaaaaaattgatcagccctactaataatatcagtgtacctacagttccggtaactaatcccagataggaagcaccttgttttttcaatctggctcccatactactggcagtgacagtgtaagcttcgccatacaaagtataagtatagtctctttttgagaattgcttttctaaatcggtacatgtagtttgtggtgataacaacacataggtatttgctcccgtcatgttataccgtttgggactttgtagaagtccttcactatcgtttacggtcagcatatctatgttttgcataaaatctaaactattgttcagagggatatctttcattactgcttgaatggtgtagacgatacctcctgtttttggggtgctttcaggagaagtattgagccttctcatgagagtcatgtgtttgccgatagcactttctgcattaccgaatattttaatggccatagattggctcaggatgacggagttaagagactgacttgccattttccaatgtcctgctaccatttccggagtgaagattttattgtagcaagtatctatttcaatcgtttcaagttcataaggtagcgtcttttccggagataactctacataataagggcgttcgcgaggataggttacggatgaaatggcttccgtttctcccaaagcccatgtgcgcaattcttcggccagaggaaccggagaaccggaaaaatatctgttcgccttaccgtcatagagatttaattctgctatgcgatcatgattagcaaaacaatggtctgtgctttctacaaaacgactgcaatatatgcagacacagaagcagagcaaacctactgccaatccgatgatggaaatgatattttgtgtcttatgcttacacaagtttctgaatgctattttgagataatggaatatcatggtatatacattttatattttatatattcaaaacttatgccaagtatgtaactttctatttattaatgatatactggtttttgttatagagtattagtgtgctatagtgcacaaaaatagtgcatatccgcacatgaattctatacttactcggtctttattatatccaccggatttatttttgcaattttcaaaatgcggaatatgacagtaagtaaagtcatgagaactatcccaataaatatgcaaatccagaagcagaaaccgtcatcgaagaagacaatatacatttgtttccataattgcagtattgtgtatagcagtggaaatgcaatcactgctgttattattaatatccggacatacatgcgcaagaacagataaagtatttgccatagtcccgcaccattaactttacggatggctacttctttgcatcggtgttcagtatcaagggtaatggctgaatatactcccagtaaagtaatgattacacttactattgcaaaaaataggatgatgttcttcattttcgattccaatccttgtatttcttccaaatcttgttgcagcgtactgatttgtggggacaaagtgtatggaagtgcttcacggagcacttggaatgcatactcttctacggcttttacttgagctggtaggcatttaatgtagcaatattctatgggtccttccatcttaagtggcaagaaagccataccctcacttcggaaaagactctcgctctggaaatatacattggttataaatgaagatgtaatgcctttgacggtatagccaccgttgaagttatacaagatgttgcctaaaataggtttgggaatccgtttttctaaaacgtcatcaattaccatttctgtattgttttgcagattattgcctttcaacagaggaatattcatgaaatggaaaaaattgggagctgcatatatgaaactactgttgatattagaatccctgttgttctcttcagattggaatccggtaatagaaattccaccggcataattgttatttgacaataatctctcttgcacacccgaatgttgtgctatacgttctgtaatggcaagtttctcttcatttttcatgaaggtgtagttcagaggaatactgagaatacattctttctctttttttgaaagagtgccaaaaagtgtggaggttgttttctctgtttgtagataaagggatactgccaatgtgacgaatatccagcagatgaaaaattgaatgcacagcatagtgttccgtataaaatgtttgctcatacgtctgacattgcctttgatcccttcttgaatagatatgcgatgggtatatgcaacagtcagtgtacaaatgagcaaattcagtagaaatatcagtataagatattcggaacattgcttcattagtgatgttttgtctatttccaatgtaaatactactaacgtaagatgaaaaaagggagccagtagttcaattaaacaaaaagtaatcagaaaggctaataagataatcagtgccgattgaatgaaaagctgtgataacagttggtggttactgcttcctaataccttacggagactatattcgcggctacggttaagaaatgagccggtaaggaaatggaaaaaattaagaaggccgataagtaaaattagtattcctaatgcagtggtaacactgataaagtaagggctgaaggttgcactataggctcccttccccaatgcagttgcacaaatcgtattatcagggaatgcatcgctggatagattcagttcgcgaagatgatcctccagttgttgtacacttttccctttatgcaataaagcgaaagtggagcaaccggtcgtaaactttctactttcactctggaacaaaccttcactatcatttagcactaataaatcaattctattgcaaaaattcaagctgttattttgtggtatatcttttatgattgcctggatggtatagacagtgccacctgaatttggggtagcatctggtgaactcattagttttttggtcagtaccatacgtttaccgatcggatcaccattttcaccaaaaaccttgcgtgcggtgctttccatcataataatagcattgggagtatggaccgcaacatcccaggaaccggctataatcttcggagtgaatacttggcggaaacaagaatcaatttcgatagttgacatttcagtaaatggatattcctttccgtctttcatttctatattgtatggacgtggatcagcattagcgatgtgtgttaaaatgtccacttcattcaatggtatatcctgcaattgctcaaagaccgtagcaggagttccggagaagaactccccgtttgaactctttaaaacaatatcggcaatgtgatcatgattttcaaaacattggtcaatacttagaaagaaacgactgcaatacatgcatatactgaagcaaagcagacacactgctaatcctacgatactgataagattttgcgttttgtatttaagcaaatgacgtattgctatttgaaaatagtgttgtaacattttttatggcgtattatatatgtatttattcactttttatcacttctgccggattctgccgtgctgcctgccatacccgccagccaatgcataacagaataagtaaacctatcccactaaatatagccagatatatccatgcactgattgctgtttgttctatataactttccagccattttttcatcaaagcgtatcctataggaaatgccatcactgatgccgcaacgagtaatataaagtactcttttacaaacatagcaagtatttcttttacagacgctccatttactttgcggatggctatttctttacgccgctgctcgcaacttagcgtaatgaaagagaatattccgaaagcggcaatgagtacgcaaataattgaggcaaagccaagcagcttcaataataacgtttcggatttcaggaacttagaatattcctcttctatattgagaagagaatgatattcattattgccagttgagattttggcatatacatcatctactcgctttttaagatcctcccatgttcctgcgcgatattttatcaatatatcaccatagttggcatcggaatcggaacctcccagacctcctttattgcagaataaagtaggtgctgccgggattgtaggtgctgtgatatggaagtcttttacaattccgacgattgtaactccttggtgaatattgattttcttacctatcggatcatctaagcctaatcttcttgcacaagtctcgttgatgatagccttatccgcatcatccggttttagcatttcaccttctattagtttcaggttgtagaaattgataaattccctcccttctcttatgcagatgatatctactctatcttccttatccgtgcttttctttccttcccaactgtttatcctgtaagtcagtgtactatatcttggaaataaaggttcacatcctttcagtgtctctacaatacatggcatcttatctatttcggcactgacggcagcataagattccggagaaacatattgtcttaatactgctgtattctttctttcccaaccaatgtcaccatttgccaggtgattgagttgtttcacaagaatgcttacgcaaaagataaataagatacatattatcaattggaatactatgctgcatttacggaataggaatagattgccggattgcctgtagtatcggcggacaataaaaggtattaataggatataggatatgaaaagaatacctataaagtagaggaatgattctccataaatatttccattaatttcggacagttctctaaatttcggaagcgataattcgataaacgtcattcctaaaagaccggataaaagcagcacaaataaatattcagtaccaaaaagtatgaataaattccgaatggatgaaccacatacttttcttaattcaatttcccggtttcgtgtgcgcatacgggtgataaacaaggagagatagttgaacaatgcgcaaagtataatcatgccgcttgctatggagaaaagtactaaataattgaatttaagggtcagtttttcatttatggcagagtaatggtattgggttaatggaattatcttatatttttcgagaggtttgggataccattggtttccggattcgtagttcttcattttttcctgaaaagatgtagcatccactcctttacgtagccgaacgtaggtttgaaatctatgtactccccattcgcttttttctttttgaaattgtgatgacattgtccatgcggcaaaatagagattactatgtttctctacatttttcagaatggcacagactgtcttaggtgtatcatttgcctctatctcttgtcccaaaacttctgttgaaccgaataatgacatagcagtctcctctgttaatgcaattttattattagaataaaggaattccatgcttccggataatatggaggtaggttggaacatctctaaaaatgtggagtcggcatacatgcaattaacttttgccgttttcccctccttggttttcagtcctgtttctctttggtaaactgcacatgcggcttctacttccggaaattcttgccgaagtgtagtagctaacatatatgaactgtatgtgctgaatgttgattcactaaaagtggcttcttgataaagcaaatgagttcgttccacaccttcgtagaatttgtcatacgtaatttcgtagtgtatccacagatttgagagtgtaaagcaagtaaatcctactgccaaacctataatactgataatactctgtattctgtatttcagtatattacgaaatgctatcttgaaaaagtgctgtatcatagctatgtattagttcacgcattattttactgatgtcattcacaagattatatatcaaagtgaatttcttttttagattaagattcaaatctcgtgccaaagttataacagattgtttttcaggtaaatatttgttttagtaatattgctttagtgtgctatactgcacaaaaatagtgcatattcgcacaaatggtacatttaaaatcacaaagaatagttataggctctgactataacttcttaacttttgatgaagtaataatctagctgtgaacaggtgtagcgttttttctcttttaataatcgggaagatgcttctacttttctctaaaaaaccatgcattagatgcactcatgaatacactccttgatgatggactaactattgtatatcagtgttttatagtctaaaaatagaaagaaatatgtgtgttaagggttcaaaatagggtcagggtcacttatacccccaaattctgctcaaatgaatagaatattttaagtgggtgtaaaataaaagcactgatatggcgtcaaattaccaaggaatcagattttataatccactctttattacttttgcttcacttttctgttttttgtatcaaacatttactcataaagaatcgttcgcattacaatatttcgaatctacgggaatttgttttttgcaaaaaccgtctaaaatcaactatctgtatatcaatgcaatattgactagtgaaattaaaaatcacctgcaaatggggctataagtgaccctgaccctattttgaaccctaacaagccttttattagtcttggatttgttatatttattaaataaaagcacgtgagaaatattatggtaagtcaaggcatagtcaacccctgccttaaacggaacataagaagcaatgtcgtgatgcagaactagcaatctcgtaatgtggaatattgctagttttgcatcacgacattgcttcttataattttatactcccaaaggacaaatcgtttttattctttaatcacttccgccggattttgccgtgctgcctgccatacgcgccagctgatacttatggtgataaccattgctatccctgcaaaaatgaggatgaacggtaatgctcctatacttacctgacgattgtacgtctctatccagtgcttcataatagtataaccggcagggaaagctatcaatgaagatacgatcaatagcattgcgtattctttaaagaagatgctcaggatattgctgatggtagccccatttactttgcggatagctatttctttccggcgttgttcgcatgtcaatgataccaatgaatatatgccgaatatagatatcaggatacaaacaattgcagagaatcccaatagactggataatgcatcttctgattgcaggtacttattatatcgttcttcctcgctgtccagaaataatttgcggtcgggaagttcagcttgctgcatttcctcgatgctacgacgacattcttcccaagttcccggtttatacttgaagaggacaaagcaacgcggccacatccactgtgatttattggtattgacaaatacagtatgaggcaggtccttggaaggcgatctgtatgcacagtcttttatgactccgatcacagtcataggttccacttctttattgcagtaaaagatgtgtttgctgatagcttcttcaggtgtccatcccatagtgcgtgctgtcgtttccatgatattaacttcacggacatccgacttatccgatatccattctcctgctaccagttgcatgttatagaatttgaagaactcctctcctgccagaatctcatctatacccattgggttttcagttgtcccattcaatccgtcccaggaatctacctcaaaagctgaataagaacccatactgatgagcggccagtaaacaggccgtacaacttcagttaccatgggtaacgcttttatcttctctgcccatacattcatgtccacattcatccagatgcccagggaagcacggttccgataatccattcccatatctacattacgcaaatgataaagttgcatttgcataatgacagtacaaagtataaatgtaaggcaaacaacaagctgtattacaatgcttcccttacggcatatatgtcccattatactcatttgagtactatgaagtgtattctgcaatgagtgacggcggaataggtaaacagaacatagcgccactataaaagccaatactgacatacctgcgacgtataatatgcaattcccataaatggatatatctgtatcgacaatcatggaatattgcaagaaccagggttttagtaattccacgaagaacatccctaagagtgaagccaatagaatagtaaatagaaagtccgtactaagtaatgccaataacgaacgttcggatgctccatttactttgcgtagtgccatttcccgtttacgcgagcgaaagcagtcgatataaatcgttaaatagttgattaatgcgcacagaatgataagcactcctgtgatggagaaataaacaatgtaacggaaccgtactatttgttcgtctccacgaataaattcatccgcataacgcagtgaggtaatgggctccagatagaaacgtgtatatccggttacaccatagctgttctttttgagttcatccggaaagtgctgattcattttttctaaaagtacatccacatttgttccgggctttatttttatcagcatcctgtaattggcgttatcccatgaagtatcattattggtacgccccataaaagcatatttaaagttagaatgctctccccaatcgctgacaatggcgcttatgcgatactcgtaccgacggttattgtctgttatgatctctccaatcactctggtagtaccgaacaagtcttgagcagctttttctgtaatggctatcccgctcttttccggtgaggtggataaaaagaattggttgtcaccctccagaacttttatatccatcatacggatgaaagttgtatcaggcattaacatcggatattccgtaatctgtttcccatttttaatgaatagagtattctgacctgatgcacagaaatcttctatttcagtgtaagtcgtttttaaatgattccccaacgcgtagggcacaaagtcagagtagtgccctccaaagtggcaatcgttcattcgtaccaaataaatgcgttctgcatccttatggaaatcatcataagtcatttcatattgcacccagaatgtagacagtgcaaaacatgccagaccgattgccagtccgatgatactgatgatactttgcgttctgtacttcaacagattccgatatgctatttttaaataatggtgtatcataactaacctctttattctgctttcatgattgttgccggattgatgcgggttgctttattcacctgccagaacaatgttcccaacgaaatgcctgccaccactaatatagcgatcaggtagatgaatatactaacaggagctttcactataaaatcccgtgtatagatgtatatcagataataagataaaggtatggtcagcaatgctgcaccggctatcacccatatatacttgcggaatagaacggaatacagatttttcaattgtgccccattcactttgcggatggctatctcgcggtagcgttggcggatgtcgaataaggaaagtccgaataatcccaatgccgagacaaaaatagagatggtggcaaacaatgtaaacacggttgctacacggcggtcgtcgtcatacagggcctgaacatcttctttcagccagtgatagtcgaactcttccgcatgaaaaatctcctctcttgtgtcttgcaaatatttgataagttccttttccttaccggccttacaggctatttggaattgtgctccaccgtaaccgggtgtcacgatgtataccacgggtttctttccggctgtaagatggccggtatagtaatctttgatgacagttcctacaggcatcaaagacaggccgccttctactatttttccgtccattgaggaagtaatccagagtgcctgttctcctcttacgaatgcttcttcttgcttcgtataaccgaatgctttcaaagctgcctcattcatgacaactacattctctgaataatcctttgcctccactttccccggcaatgtaccttgtactgcttgcagttcatacagcttgaagaaatccgccggtatatacatcaccatcatatttagcttcacgtctttatcattaataagtgtcgtactgcctccgctactgaggatgccactttgcgagggatcgccacagaaccaccgttctatgaaaggacattcatccagcttttgccggatggtagtcgtattctgccagcgctgttttctttcggcttcattttcacctccccagctcttgggggtaggaatcagattggcataaagtatgccttctgtcttgaatcccggaggggtattttgcaggaaacggaggtggctgctgaagtatagagagaggactatcagcaaaagagtgatgctatactggataaacaggaaaaccgtacgtgtagcgacagaatgccgtgaacttccgatggaacgtatggacacgatgggtggcagataattgtatttgataaaaggatatacagtagtgagtaatggcaaaagcaccagcacaccgagcgacagttgccagtcgaaagccgtataaggtacatcgctgcccagcaacctgctggcatatcccgaaaatatttcgataaagaaccaggccagcagcagcgagatgacgatcatcaacatattttccgtccataactggaggaagagtgcacgtccacggatgccgaatactttcttgataccatactccttggaacgtttcagcataaaaaccagatagatgttgacgaagtttagtatgcctgccagcaataataacaggcatactcccataagtaccagaatgtgcgaacgactgctgtaatgccacatattcggttgatcggccatggcagccaatcccttattccagtagagttgactgacaggaataaagtcgtaactcaccatatatccccattctgtttgtcgcttcacatggctgatagcattaatggcatctacatctactccgggcataaaacgcaggatttctatatacattttgctccactctcttctggttttcagttccagatttatcagtatatcaaatgttagcgaagatttgcatgccggttcttccaatataccacagatcgtcaacagcttgcctccggagtatcctatcgtttgtcctataggattcttatctccgaacacacgtttggcaaactgacgggtaatgagtacttcttcaggcgcttctatgtgtttacctttcaatgggtagtgaaagaagtgcaagaatgctgtgtctgctaccaatgcttggacggtataaggtttctcatcgatggttacattgtcattgtccagtgtgatgaagtaacttctcttttctatggcttcgggagcgtagtaagccgtatccgcaccactgtctttattcacactgccagggaatacattgccatcaatttcccgtagcgggataaaagtcctttcagcatgggtgcagtgcgtgttcacttgcaactcacggtgaatgtagcgtactaatatgatggtacatgccaggctgagtgccagaccaatgacattaatgatcgtatatgacttggagcgtatcaggaagcgccaggcgtatttgagtgttttcatatttcagtctttctatattttagttatattttatttcttattcgcttttcataatttttgccggattaatccgtgcagctttattcacttgccagaacaatgtacctaacgaaatgccagaaactatcagtatggctatggaataaatgaatatgctgataggagctttcactacaaaatcttgcgtatagatgtatatcaggtaataggataaaggtatggtaatcaatatggaaattcctattacccaaatgtacttgcggaacagaactacatacagatttctcaattgtgctccgtttactttgcggatggctatttcccgatatcgctgtcggatatcaaacagagaaataccgaatagcccgagacctacaattataatcgcaatacaagcaaaaacggaataaataatgcttgtttgtctgtcctgggcatagattgcttttacgtcttcctccagaatgctgtattcaaaatcttcactgccataaatctttaattccgttttacgtaggaactcaagcacttctttctttttacccggcacacaggctatctgatagacatcgccgttcatctgattgctcaccatataaacagtaggtttctttcctaaagttaaatgtccgttgtagtaatcatctaccaccgctacaatgggttgggttttggattcgtttcctcttttcaggggattttctatgctggcaccttgacaagtggtgtagtttaaggctttcatagctgccttattcaccaccagaactccgaaaaagcctttatctgataaatcggggagctcgccttcgataaatttaatatcatagacccgaaaaaaatgaggcgtggcaagacgcatattcaggtagatcttcctcccttgctcgtttatataatcactgccataatctcctttaagaatgtcaatatagctagtctcaaaatcttctatatagggacaggaagaaagctccttatttaatgcgttcactcgctcctgctgttgtttcatgctctcttccgtgtaagtattaaaatcctttgattcgtaagtcagctgagcaatgataatatctttggtacgaaaccccggttcggtactaagcaacatattcagttgattattgaaataaagcgagattactaccaataaaaaagtgagtacgtactgaatccccagaaataggatccgtgaatgtattgaacgactttccgaacctatagaacggatggagacaatagggggagtataattgtatttgatgaatggataaagagaagtaaccaatgggagtactaccaatatgcctaatgataattgccagtcaaatgtcgtatagctaaactgatgattgaaaagatttctcactggcacagtacttacttctacaaacacccaagctatgagcatagcggctgataccaacaaagtattctctatccatatattaagaaatagttctttaccccttgcaccgaacacctttttcaatccgtattcttttcccctccggagcatgacaaccagatagatattgatgaaattaataatacctgctaatagcactaataggcatactcctatcataatccacagatgggaatagctgccggcagagaacatcaatgtctcctcattactgatggagctatcccaatagaattgtttgacgggaatcaaagaataagtataagtacgcgtatcaccgctttcgggcgagtttatatatcttgggatactacctgttttgtttagcttatttatatcagtgcccggcatgaatgaaaacaagtctatagccatacgttcccaattatcagataaggctttagacaatactacatcgaactgcaggaaagtcttgtttccgggattacccaatacaccctcaatggttatgtcctttccattagaacaacggatgattttacctaccggattctccttaccgaagagcttgtgggcaaatgcctctgtaactaaagcggagtgcggagaaggtaatgtaatatttccctgcaccaccgggtagcggaatagctgaaaaaaaatactgtctgttacgatgattcgcgaaggaaaccgatttgccccaaccattatatggtctttctccaacggaatgaagttgctctgcttattgatgtagcgttgatcgataaggctgctatctcccctattaataagcatacttaaatatttattgccacccatatccgctttgacaccataaacctgttcccggtcaatgcaatggctatccactgtcaattccctgtgaatatagcggaatagaataatgcaacatgccagactgaaggccagccccagtagattaataatcgtatatgatttggagcgtatcaggaagcgccaggcatatttgagtgttttcatatttcagtctttattatattaatctctttctgttattttgctattctctgatgatgctgtatttgttccttattttaatatcagttcttccgcttcgccaaagttatcatatcccgtcgtaataacccaatctcccggctgtaaaccgtctgtaatctcgtattgctggggattctggcgtccgatactgagagggacacgaattgctttcgttttggatgcgtttagtttgtaaatccattgaccaccggtagcctgatagaaattaccgcgtgggataacgatggcctgttcgggttgtcccaactctatctgtacacgaaagctctttcctacacgtacattgtcgggcatctctccggtaaatactaagtcgacatcgaaagtgcggtcttttacttcgggaactacctttgtaatacggagtggatatttacgcccctgataattaattgtggcgggaagccctgtagtgatacggtctatgtagtattcactgagtgaagtgtgtattttatattggtctagtaccttgatttcggcaataccttggttggatgatacttgctgccccggagttactttcacgaagctgagttgtccggctacgggagccttaataactaaattatccagtcgttcgcaagcgcgttcatactttttacgttcacgttcccgatcattatgaatcaggtctttgcggataatggcaacaacagaatcctgacgcaaactctcgcgttgtaactttgctttctttacattataattatactcatcttcggcaacttccagttgagctttactttttatccccattttatattcttctttatcaagattgaaacttttttgaagacgggccaactcatagttggtttgcaaagtttgttgctggagggtcaggctcttctgttccatctcaatttctttttcacggaaagaaatcaattgcttctccaaatcatcacgttgttcttcaatgttgtgtatcagatcagggttttcgagtacaaggattgtatctcccttttgaagcaaacttccctcctcgcctactatacggtctacacttcctgattcacgggcattaacgataatggtgaggatgggttgtataagtccttccacgtctacatattccatgaatttatcatttttgacttcggcaatctgcacattctcctggtcgatgcgaagcttgctgggaccggcagaaaggatgataacgtaaataatgaaagcaaggaatagaattcctcctgccagataatagcggtagcggatgtaccaaggcttcttttcgagtttaatatccataatatctttattgttttacaatttatagtcaagtttataatatgtccctttatttttttatcatcttgtccatcacttcctctattctttctgtttctgtcagcggtgcatctacttcaaaatcataaagtgtgatactgcggagggtgtagtacaaactccagtagttatatagtgcagtgatgtaatttcgtcgggcggcatctttttcactgatggaagcattgaggtcgagtacggtagactttcccaggatataaagtcgtcgggctacatctgcacgtcgttgagccgtttcatcggtgcgggcggcaatatgtacgcgctgggattgtaaattgaattgttttaccagtttacggacattcagttcaaagtctgttttatcctgctctacttgagtataagttaagtcacgattggaacgggctacccggacctgtcctttgccacgtccccaatccaatataggcagactaatgccgagggtgacatattgttggtccaagggattgtgataagcgtctttcagtttattgccggtctgagtcagtccgaagcgcaagtaaagatcggctttcagtccggcattggcacgggcactggctacccggctttcgctttccaacttgcgtcgctgcatgtccagtatatccgggctgttttgacgtgctgtgattaaagctgtgcttaggtctatgtgaagattgggaacatgatcgctgacatctactttgatcagtatatcctcctggataccgagatacgaacggagttcttgcatgcaattttctacttcgatatgggcattcatacgatttgtctcttcggtcagcttattaagttccaattgtagcatctcgttttcggtaatggtacctatattatagcgcccttgtgcatatgtatataaggtgtctgcattggcatagttggtagaagctatttcgtagttgctttgtgcagtggcaagggcaaagaatttctgcgtagcattggcagcaacgagctccagggtttccacataagttttcttggcttcctggtaacgcaatggttcgatacgacgattccatttcagactattatatccaaaaagagactgactatagccgacatttatgggtgatgtctgccaggaggtagagttgtcactaaataaatcaagccgctgggcagaagtttccacgaacagtgtaccacctgtccaaggaatattttgtgtcaggcttaaggtgaggtcggtacttaataagttttgttccacaaatttcacgctaccatcgctcattgtaattttgttgatggcacgattcagatacggatcggaagttaatttcaaggcgggcaaatagttggcccgataatatttgtagttccagtaggcggaacgaaaactgtgttgggctgtttgcgcatcgggtgattgtcggcgggcatgctctatggtctgacctaatgtcagctccatagtgtgttcctgcgcatcaatagttataagagttccgcaagctattaataataaaagtatttttttgtacatagtatgttccttttggtagaagagattcaaatcttatgccaaagatctaatgctttgtattacagtgctatacttctgtatgatgtaaattgagcgtgtgccataccgcacaaaaatagtgcgcatacgcacacacaacacatcgatatattgtttatctttgcacatcggatatattcatattgcagaaaagactatcggataataatatcttcgtatggaacaattaggaaaaatattaatagtagatgataatgaggatgtactttttgccctcaaccttctgttggaaccttatgcggaaaaaataaaagtagcagtaacccccgatcgtatcgaatatttcatgacgacattccagccggacattatcctgctggatatgaacttcagtcgcgacgccatcagtgggcaggaaggctttgagagtctggaacaaatcttgcgtattgatcctcaggcggttgttatttttatgacagcatatgcagatacagataaagcggtacgggccattaaagcgggtgctaccgatttcatcccgaaaccgtgggaaaaagaaaaactacttgctacactctcatccggtattaagttacgccgttcccgctgtgaagttaatctgctaaaagaacaagtggaggtacttagcggtgcgggaagtagtgtggaagaatctattattggtgaatctgccgcgatgcaggaagtgtttgccacgatagagaagctgcgcgatacagatgctaacattcttgtacttggtgaaaatggaacaggaaaagatgtgatagcccgtttgttataccgttgttcaccacgttacggacggccattcgttacaattgatctcggcagtatcccggaacaattgtttgagagtgaattatttggctatgaaaaaggtgcatttactgatgcccggaaaccgaaagccggacggatggaggtggcaacgggaggtacattgtttttggatgaaataggaaatttgtcactacctatgcaagcaaaactgctgactgctattgaaaaacggcagatcagtcgtttgggtagtacacaatctgtgtccatcgacgtacgcctgatttgtgctacaaatgcggatatccgccatctggtagaagaagggaatttccggcaggatttactttatcgtatcaatacgattgaactacatattcctcctttgagggaacggggaaatgatattattcttttggcagattatttcttgcagcgttatgcccggaaatatcaaaaggaaatgcggggcttgacacgtgaagcaaaagctaaattactgcgttattcctggccgggaaatgtgcgtgagttacagcatacgatggagcgtgccgtgattttgggcgacggttcattgcttcgccccgataatttcttgttccaggcttcctccccccgtcttaaaaaagaagaagaagtacttaatctggagcaattggaacggcaagctgtagaaaaggcaatgcggttgagcgagggtaatatgacacgtgctgcggaatatttgggaattacgcgctttgcattgtataggaagattgagaaactgggattataaattaagaagtaatatgaagcagtattccttggttgttatcttgcatatctgtctgctggcaatactttctgttggtgtttatgtgttatattgtgctgatttatggtttagcatgcttataacattcctgtttcttctggggacaggaatacacctttattatatacagatgaagcaattgcagatgatgcgtcgtctgacggacagtttgcgttataatgacatgacacaggctttccgtccaccttataaaaataaactaatgacagaaatggctgtagagctatctgaaaccttgcaggcatttcgtgctcgcctgttggaagaagaaataaaacatcagtattacgaaagtctgctgaacaaggtagatactgctgtattagtgactgatatgtccggacgtattgagtggctgaatcgtgctgctactgcccagttagggcaagatccgcaattgccggccgagcttttgagccttccttccggtgaaacgcaggtcatacgtattcatcgaaatggaaccactttagaaatggcagtagctaccactctctttgtagcccgtggcatggagaggcgccttatcagtttgaagaatattcattctgtactggaacggaatgaaatggaagcctggcaaaagctgatacgtgtactcactcatgaaatcatgaactccattactcctatcatttccctctctgaaacacttagtgagcgtggtgtacccgttacattaaaagatgcagcgggcgaaaaagaatatgctgtaatgctacaagctatgcaaaccattcatcgacgtagtaagggactattaggttttgtagaaaactatcgtcgtcttacccgtctccccgctcctgtttgtgccagcgtgccggttcgggaactattcaccgatttacagaaactttttcctgatgaaactattcatttcgagcttccacctttggagaaaacactggatgtggatcgtgctcagatagaacaagtgcttattaatctgttgaaaaatgctcgtgaagcatctgcccgccgcgaaacgcccaagattgaggttaaagctgtttttgcaccgaaagtgacttcttctcttactgcatggcgttgtactattactgttcgggataatggtgaaggtatcttacctgaagtacaggataaaatatttgttccattcttcacaacaaaaactgctggttcgggtatcggactcagtctttgcaagcagattatgaatcagcatggaggaaatattaccgtttattcggaaccgggaaaagggagttgttttactttacaattctgttagataaatactgcaccagcaaaaggttgttctgtgtctattaaaaaacataaatattatataatcataaaaattctgtgccgatattttattgcttttaacagctactaatttttccattatttatttttgcagccacataaatcgataactcatatttaattaaccataaaattctatatgattatgcgaactaattatttgctgctattaactattttgttgggtttaatacccgtgaattacacacacgcctctgactcaattccaagcgtgtttctttattctccttatacaaagatttctgtttctccgggaacgagtattgattacaaaattgatttaatcaataattcggatattccggtcaatgtagatctgtctgttacaggattaccagcaagttggaaacgtgaattgaaatccggtggttggaatattaacaaattagctgtcctgcctagtgaaaagaaagactttaacttgaaattggaagttccattaaaaataaacaagggtagctacaattttgttgtaactgctggaggctgtcaacttcctttgactgtcaccgtagctcagcaaggcacttatcagactgaatttaccactgatcaacccaatatgcagggcaactcaaaatcgacatttacttttaatgccgtactgaagaatcagacggctgatcagcagttatatgcattgatgtctaatgcgcccagaggatggaatgtaatttttaaacctaattataagcaggcaacttccgcacaagtagaagcgaatgccagccagaatgtgtcgatagacgtcactccgccggctaatgttgaagctgggaattataagatttcagtacgtgcagtagccggtaatacttctgctgatctggatttggaagtggtggttaccggtacatatcaaatggaactgactactccacggggattgttgagtactgaaataactgccggagatgtgaagcgtctggaattagttgtcagaaacacaggttcctctttattaaaggatattcaactctcatccggtaagccaaaagattgggaagtatcttttgaacctgccaaaatagaaatattaaaagccggagaaacatctactgttacggctataatgaaagcttcgaaaaaagctttgccaggcgactatgtagcaacaatggaagccagaactcccgaagtaaatgcaactgcacaattcagaattgcagtaaaaacaccaatgctttggggttgggtaggaatattagtcatcgttgtagctgtgggaggtgtctattacctattccgaaaatatggaaggaggtaattatgggcgaacaagtgattgtacttaccgatttaaccaaaaaatacggtaatttcactgctgtagaccatattagcctgtcaatctgcaaaggagagattttcggattattgggtccgaatggtgcgggaaaatccacaactatcctgatgatgctggggttgacagaaccaacttccggtaaagtggaaatttgtgaaatagactccactacaaatcctattgaagtcaagaggaaaattggttatcttcctgaagatttaggcttttacgatgatatgaccgggttggaaaacctcatctatacagcacttctgaacggcttttcaaggaaagaggctgaagagaaagcaaaggaacttatgcgtcgggttggacttgccgaacaggtgaataaaaagaccggaaagtattcccgcggtatgaggcaacgtttgggtttagcggatgtattgataaagaatccggaaatcattattttggacgagccgacatccggtatcgatcctgccggaattcaggaatttatagaattgattcgtaatttgagtagggttcattccttcaccgtgttattttcctcacataatctggatcaggtacagaaagcttgtgatcgtgtgggcttatttaatcacggagaattactggcacagcttgatcttagagaaatggaaggtaaacaagtagaacttattgatatctacaataattatataaaggaaggaggtgagaagtatgaacggaattgagcagcctttctgggttattgtgaataaagaaatccgggatcatgtgcgtagttggcgctttattattttacttgccattatcacgctcacttgcttgggagccttgtatacatcactcaccagtatgcatgaggctgtcaaatcaggtgatgtggaagatacttttttcttcttgaaattgtttactgtatccgatggcacattgccttcttttgttttgttcatcaactttttagggccgctgttaggtattgccttaggatttgatgccatgaattcggaactgaacaaagggacattatgccgtatattatcacagccgatacaccgtgattgtataatcaatgccaaatttgttgctgcactgattgtgattacaattatgctgtttgtattaggttttttggtaatgggagccgggctgatagccatcggtattccacctacaccggaagaatttgcccgtatcatttcctttttgatcctaagtgttttctatgtaggtctttggttgaatatggcgatactgttctcgctctgcttccggcagacggctacttcagctttggcttctctggcgatatggttgtttttcagtgtattttatacgatgattgtcaattgggttgctaagatgttcatgccttctgatatgatgccgccttattatgttgtcggttatcaaaaaatagtttggggcataatgtcattgaatccgtgcgaattattcaatcaggcaacttctgtattgctgatgccatcactccgaagcttgggaccgttaatgatggagcaggttcaaggggcaatacccagccctctcccattgggacagagtttgctggttatatggccacagctaacaggattgattgcagttacaattctctgttttgcactctcttatatcatatttatgcgtagagaaatacgttcaaggtaaattgattggttaggttaggaagaaatccctgacgatatttaatactttaaagtcgtcagggatttatatattgcagtttgtattatttctgccttacatactccagagtatatccataattggaacttaacactaacgaatccggcgttagcttgtcaatcttcagtgtatccacaccttcaatctctattccattaccgatactttttactgtcagataaagctggtcaccttgttgttcccattctttgtatatcaaagtgtgcatattaatggaagatgcttctccattctcttccagtttgattccttgcacttctccaggttgcccgttaatgggcattacccatgatcctactacggtagcgggagctttagaaccaccacaggcagcaaatataactgccatgaccgccatgctaatgatttgttttttcatgatgtctttttattatagtgtaacgttgaaacctaccaattgttttcaggggataaagttaattgaaaaatatcgttccggagctattattctatatttaagtttcgcaggctaacgttcttttccctaagcttgattggccaaagcatatcaggatttacgcaatcagtccaatatggcaataagatagtgaaatacgatatttctcttcaatacgtttgtatttccccattatcagcaataaggttttctgtcaaaaaggcccttctggaagaataaaaccttagtttatcattatcatatcatctattggtatgctacagatggtctattcagcgctattgcatgatttgttttaaccaaacagaccatctatttgatccaaacggatgatgtaatttggaaaatggctacactctttgcctcatagggctacaccttcatcactaaagggtgatactatcacggaaaaagggtgtagcccctccgaaaagcaggtgatatttttctgttttgaagaagataagcaacgaaatctaataatcactttttaggaaatatatcaaatacgtaatcaaataagaatgaaatacaaagaactcactttccaaaatacactttccctcattattataaatcatacggcatttaccaaacaggaaatccttgcgtcttttcgcactacgccaactattgatacgaaaggatgaaacgtaggatatcacgatttacattttgtcattttgcttaagttccgcaagtgtagtgaatgatcttgaattattttatgtttttatggggagttggtacggagcaaatacgaagttggccctgtctaaatgggtatttatgacctcatctgattttttttttgtaaaaagagtcgatttgttttgtttattacaaaatagtttctacctttgcactcgcttttaagaaataaagtattcggggtgtagcgcagtccggttagcgcacctgctttgggagcagggggtcgtgggttcgaatcccgctaccccgactaaagagaataagttgttgattttcagcagcttatttttgtatatagaaacatccaacaaaataactgtctataactgtctattaattgtctattgagttagtaaatcatcacctaaaactcaaaaatgacaaatatggcaagaaaaagatcgttgattatcctaccaaagttaaagaactgcggtggagatttaagtaagaaatggtatgtggagtattcttgcagggatccacaaaccaatgaaatgaaaagattcaggcattatgatggctttgctgaattggaaacagtccaagaacgggaagcctatgctgaaaaaatcatttcggaaataaagcttaaactcgaaaaaggagaagatccttttagcgagaggaaagtaacgtaccaggatgaactgatttatcaagctgcagcggctcgctggggaaatcagagagaaggaattataaatattcgcacgtatctttctgattttttattaatgaaaaaggcagaggtctcccactctacttaccagacctattgttccaagctccgtattttttgtgaatggatggaactgcagggatatgcagaaaaacatgttcgatgtatttgtcaagatcagattcataagtttttctattatatagctggagaaaatcatgcaagccggagaactgtattgaagtataaacaactcctacatactttctttgactttctgatgaagacaaaggaagtaataacagtaaatcctatatctaatattccacagctgggagaaaaacgagatgaagctgcaagacctataccggataaggatcgtaagaaactcatcgaatatatggaggagcatgatcctcaattactattagtttgccaattggagtattattgtgcgattcgaccaaatgaatgtcgacagttattgataagagacattaacttggaaacagctacaataacagtgagacaggatatcagtaagaatgggcttacggaaacagtcaatattccccggcaactgtatgagtacctggaaaacattcttcggatcggaggatatccggaagattggtatctcttttcgcgagatgatatgcctggaatgtataaacttggaaaaaacacatttcgatataggttcaatcggatccgaaaaattttagggttaagtgagcgatacaagttatatagcttcaaacatactggcggtgtgaaattggtgaatgccggtgtgaatacttgggaactacaacgacattttcgtcacaaatcgattgatacgactgagaaatatgttaagaggaattttggtgtacaaagtaaattaatcagggacgattttcctgatatgtgattaatttgtttgtaggaggcttatttatgcctcctactatcctacagtcctacacaattatattcattcttattaaatgatcatcaagcgttttatgattgcatttcagttttcggcagatggcagctttcgagtaaccataatcaagcatagtccggataatgccttctttgccggtcagcttataatgagtattcttatcgcctttcttacgtccgagttgtatgccttctgcttttctacgtgcaagtgcctccttagtacgttgagatattaattcgcgttcaatctcagctgacaagccaaaagcgaaagcaagtaccttactgttgatattattgcctaactcgtagttttccttgacagtaagaacacaagtctctttcatcatacagaggtggagcattgacataatgcccatcagatttcttcctaaccgactgatttcagaaaggattaaggtatcccctttcttcatcttcttcagaagtggaccaagctttcgttctttttcagatttggttcctgtaacttgttcagaaacccatttatcaattactaatctgcgttcattagcaaaattctgcagttcaaatctctgattttctactgtctgtttatcggtgctgacacgaatataagcgtaaatcatttttgctcgtgaagataacaaagtaatccagcagaaaaaaaaatacttcagacgcccgttaaaagtagcagaatatggtaatagagacagtgcaattatcagaagtaatgaaagactttactccagcaacagatatatcgtatatctatggagaaaaggaaggcaatcaagggaaaatagataaagttaatttagtaagtagtcttgtggaaaaagtcgcctatgggactactgttgattgtaattccattaagagaaccagtattatcacctcatcttcgtgggaaaatgcacccattgatcgacttgcaatattagagactttatttcattctaaagattggattttacaacgcttttcatcccctgcaagctattccatgttatatgttcgttcatttcatgatggaacaacttggggaccatggagaaaaatagaatttactggttaaaaacatatttataggggctatgtgcccctataaatatccaacacactattgataactgatatagaaatcataattcaatacaagtttccccatcaattctgtaccataatcgtttttctcctgtgataacagtaggaaaaaagaaagtaactttagcatgagtaacattaattcggaaaaaaataccagcagaattttttggggcgtattggctattacttgctgaagtattattataccagccataacgactaattgtatcatcataattagttattatattatttccactattgggtaaattccccataggtattcctcctgcaagtctcaataaatcaaatggagatatattcgtactaatatttccagttatagctcttatcaaatcagccctttcaagttttggaagtccactctcgtctattttctcgatcatatctgctacttttaacgggcaatataactcacagttttttacttcatttttcacaggctatcttatcagtaaaaatgcagtataaaggatgcccgttaaatgtagcaaggtatggaaaatattaaattgtcagaagttgtattaaccaatagcccctcatcaattatagggttgacagccgatcataacgtggcacaggtgactgtagatagcttgtctaaggttgaatatgcttcttcgactacaggaacggacaaaatgagatatacacaattaagatacagttccagttctggggcgggaagtagaattttgctatttgttcctatttccggtttaacagataaagtggatgccactggagtcttaggtagtttatttgtgttaagagcaggtatagaatatagtccgatgatggtcaaggccgatatcgtgttatttcgttctgcttcacgtcttataaaggacatgaatgtaacaggtgcatggggagggggcgccggctctgtaaactttaaattaggacattgcaattataatggacaattatatcttgcaataaaactcaatactgaatattccctcactacctgttttcaaggattttacacctcagattgtgtgtttcgtaacgttattgaagaggatgtaactgactggacggacttgtaatgagattagcgtccacgctttctttataaattgcagatatagaaacggagttattctcgtgaatcagataataggggcattatgcccctattatttatgtaacttcaatatatgttgctgtatcaacttcctcctgattggcaactgataaaggtgtaatgtcagtactgggtaaaatagtattcagcaactttacatatatagatggcgtgtattgcgtatgttccaatatgattttaaagactccggtactttcgtttgaccacattttaaatcttggagttgtcggagcatttgccccacctaaccgatttaaaattattgcaggtgcctttaaaacatcggctgatctgttaatggtcatatagaataatgtcattggtccgccaccgtaagcggcaagactgataagcaaggaggtagacatcgctgtcgtgttattacactcatatacaatcctcgacgtctgcgttgcaatcattttttccttccttacatcactggcggggttaagcccgtttttctcagttgtagcaaccggaactacatttatcaattcatttactacttctaagtcattcaaataagttttttccatgaccttgctatttttaacgggcggaagatatgagagaaaaagagtgatggtttcaagtatgttatttgtcaggaatgaattttacatagacatttattcgattgctcaaattattttttatatatatatacccattattttctttcctatacacactaacaattcgttcgttttgcttaaaaaagctaactcctgagacatcattcaaaacgactcctcctgtattgccgtaaattatagcaactccaataggaaattcagaggatgcgaattgaacaagaattaaacctccatctttactttttatttcatattcttcaaatggctcaaagaccttatccagactatatatacccattacctcacgtacatttttaatggaagagcttatgctatttccactgctatctaaagccctaatatttgttggaactccatttggtagattcttttctacatcctcaaattttatcgtctctattgccatatctgttacttttaacgggcgttttttctatcaagaaaatcagcccaatttaacattttagaattatctcttttttgtttaatttgtttcccaaaatcacagcattgggagatgctgataaagacggtctttgccgtatgatcaataactctccaaagtaaccccatcggaagcgactttgaaatttggaccatttctaataataagagctacccccaaattaggagctgcactcatagttattggtgagaatattaaatctacagtatcaccaggcttattcaaacggacaaagctgtattgttttcctctatataaaaatatataatcagttaaataagcgatttcaacaataccttttccaccattgattacggttaactccgttccgaatgattttgaacccggactgaaatagagaataagcaaagtatcactatcgctcttcaccacataaatattgcttttagcaagcagtcgatgagcataccccgactcaataatcgatattcctctctttatattaccagataattcgcaacctccatatttaaaatcaagcataagattaggagtaaattcggttgttccaaatttccggtaatcattggtaggattgcctgaagcatcaataccttgctgcgatatcatatatccattctggaagacagcagaatcaatcatcccaaacttaccaagaataatccggccggccaataaagtagagtaaggatatggcgtccataatccactattagggttattctgaatccatgtcttaggatcagtcgttgtattaccaggtacacgactggtccacatatataagacatcatcatcatcattatcccccattaggtattcaccgttcttgaagacaagcttagcagaccaagactccgaacgagggaatggtgtagggttggcaacaatgatattcacttgcttactatcaatctcctttttccgggctgcatcttcataggcatatatactgatgcgattagcagtcggatatttgtctgatgggatggtatagctgtaagaactcacctgtcccggtgagtcatatctatagtgttcagctactgcctcactatatgcactttctacgcataatgtgagataggcagacattgcagttttattacttccttctcctgaccagaaccgaatgtccaaaggtgcagcttgcacattatatgcattaagcgaaaccgtttctggattagtactaatccagaaacgttcagtctcagccgttagatagaatgttcctgtcagtatcatatcatacaatttatgcagtcccgctaatagagcctgacaagcccattttagcacgtaccatgtcttcaaaagtaatcttcgcattggctcccgtaaatgtggcggcactcttaccagtaaggatgaatgcggcgccggcgttatctttcagagagaatgtccaggttgtaatgagcgaaggaacttcctcacccgtgctacgttttaccgctaccggtgtgactgttgcagtctcgccttttttaaccacatttccactgatacctgttatcttgagaaatgcgtagtagggatcagaaaagtcagtaatctcatcatagccggaggcaaccaatgaaccgtctttcttcacatcacagcgcaatttaagtacgttatccacatcattggtagaaaccacttgagtgcgagatgtaccccagttcgtgtcacctgctccaagcattttcacccactggaaagtaaagccggtgtagtcagtgacttcaacgccatccttaaagatacggactgtatctgttaacgactccccggccgtaagaagctgagaccccttgttattcgaaatcaaggcatcgtactggttgccggtggattcctgaatgacaacctccttggacaacgcattgaaaccgatagaggaaccggagatttcaacagtacctgaaacagtgatccggtcattgtcatacccggagatgggtacaagattcttcattacacgcagggccggtaccttataagtagctccgccaatggtagtactgtaagcgtctattttcttgaaataaccgaccataccggagttcgtagacaaaccgttattgtcaaatgtcagtaacaagtcattgtaacgatactcaatcgtattgggtacaagaatgctaccgtcagaaatatcacgcagaataacaacgacagtcggacggccgttttcgggtagtgcagtaaagtccggtataaaaacaaccgttcctttattatacctctgtacaagcggagtgccttctacacgaagtgttccgttgatggtagtaccatccatcagggcaataagagtaaaacttccttcaagattcatacgtcacccccttcctgttcaactgggttttcggccgattcttcagtagtgatatcttcttccagagattcactatcattactgcttccaccagttacaggttcttcactattgttgccctcatcttcttggggaggatcataaaggccgctttccttttgctcttttatcagcactttcaacttgtcatccgaaaggatgttcggcgcaaaattggaaagcaccttcaaagcactgagtggcaggattacacggccgtccggaatccgttcggcatacttgtaatcgtaattctgcccgtccagttcttcaggtttcactaacagataattcataagctattcatatttaggtgttataatcaatttgccgtcactcgtagttaagactttgtcatcatttgtagtcactaatgctgttactacatacattttcacagcagcatataccgatatgggatacaaaggatcgaatgaatatgtagaaggaataaactccaccgttcttccacggcccacattctttgctgtactgcccgctttcgcagacttcgcgtaccagtcaatcacgaatagactatccttgctactgtcaatcaattgcttattatacgataatatacactcgtaacctacagtggtattcatgcgagagttgatcttgatgcctttcgtctgccgaatgtcggcacgcaatgtccccggcatctccactttgatggaagtcgtcgcctgcatctcgtccgaagtcggagaagatggacgcgtaccgctatagtaagcaccacgaacacggactgaaatattcctgaagaaccgggcatccagtgtaagagttttcccccaggtaccattggcgtttttaccagaaacgaatacatctaactcatcctctgaaaagtctctccacgtcgtaccgtcaagaacctgccaccaataagctgcgttggcatcagatactttatcttcaccagaatacacctgagctgtgatcgaataaagccattctcctttactattcggtattacttcgagcgggtttatagtccatccttttggccggttgatcttcagcgaataattgtttgagtcaaaaatactcgtccggagtacagtgctacgctcaaacttttcctgggtattctttcgcttatcggtaatcgagaatatgcagtgtagctctattggactgttgtagtccacattctttttcaccgtcaaagaataagtaggtttgcctgttgcggacacgacataatcatcgttatttacgatacgattgctaccgtctgcctttggagcaccttcataccattcggcaccggtaatcgcttggctaccgttcatcagtccctcagggtcctgaaccgaaatgtaaggcatgagtacgcaagggataagcgagcgatccggttcatagtcattcgtatccttgttatagttctgcacaggattaccggatagaacttgtatctctgccaggaaagaataaggatcaatatgtacctgtacgtctttgggttgggtttgtatagccattttaataagtgtctattatagttattttcttatgccctgttttttctgttaccaactcctcaaggctcttaccaccgactctctgaataacaattgtcattctacggcacggtataagtcccaagaacttgtaccggtattcaacgaggtgaggaaaaactttttctaatcccataacttttaaattctaaatccaacataattttctattgtctccatatcttcgcccaccgggatgaacacccggcagatgaacttcactgttctaaccgaaagcccccattcgctccccatgtcaactgaagtcagccggataacatgcttctgtccgtccacatagacaggcttccaactgttatcggcagggatattcccggtatcccgtaaccactccacttcgacaccggtagtagccataaggacattggtgatatcacgattaccgtaactcacaacggcggcaatatcggtattcacaccgtttttgaagaactgccaaccggcagtagaagtaaactccaggtgatagttcttgtcaccttcgagcaatacccatccggcggagttccactgaggttcttcagtcgttttatcaatcaggcatccccatttgcaaccataatgatagacggtatgctgttccagtgtagttattaccttttgattctctaaaagagtttcatagtctacaaatcggtaaggctcatcaccttgagctgtagtcaaagaccactctccgcgatccacttttttagggataatcgttccattccagtcagcttcatagattttctcaaaaacacctatcttcgacattacaccgacgtcagtagagccgataggaagcttctctatcatctttacgttgggaaagcgcccaagagtcaacgcatagttgtaatcttcgagaatcggtctgaatacattctgcaaaaacatgatcctgccttcacgggaagatatcagccagctttgagcacgctcgttcggagcttcaccagcatccggtactttcgcattacctttacgagtcacattatacccttcaaccggtgggtagttcttgccgcccggtacttcgctgtcgggataaagaactacagtcaaagtattatcattgcggtttttcgatactggtctgaaccaagaagtatagtagtcggtacctccgatcaacagcgagttcacgatagaacataatacgtcgttttcctctaatgtggtccaatccgtatctgttcgtttctccatcgtaagccgataagtgccatcgtccaacaattcaaccttttcaatggcgccacaatcagagaaagagaaatccccggccatagcatgaatttcgtttatgataaggcgtaaaactgtcaatgagtcccgaatctccaagctgttaaattgcgcacgcccatcaggatatatgccacctcctttaccggcaattagtgagtcaataaactcaccaaattgtagcagataatcggtacgatcaactcgatctttgtgtatgtacttatcaccttcgatatcacctgctatatcagcataaccggctttgatcttcttattgttgactaacagatattctgcgacgtagctaagaaggttcaagaggtcgatattccggtgctggtggccaataccacctccggatccggcaaactctgcaagctgttgaccaacgaaagtggcaaaagcttcagcggtcgtgataccccattcttcggagtatgggttttgaattggaaagagtgccccctcggaaagtggaaggcgaggaaattcagcaagtcgagggggcactgtaaaagaaccgatttcaggtacagtgatgttgagaacatttgccggaacatcggttctgggaaggttcaacaagggacgggcatccgcatatttgaatgtaaatgtgtaattggaagggagtgcacggtctgtgtagccaacgttactttctgtcacgactatttgacgcaaatagttgccggcataaagatacttagcttgagagggaaaaaagtcaagtagccacttacgctcatcttgattcaaatggccggtgtttttttgaaactttcgttcggtatcgacacggtactcttgagaaatttcgtcaatttctgccaggttatgtgtatgctcaccgctgaatgttgtagtaccgtaggcacggaaggtatcgagacctccgagggaattttcgaagaggatccactgctcttgctcggtacgcatgtcttcagcataataacgctgtatgtatgtgagacgctgaccggttaggttttcaacccatatatcataataggctggcaatttatggccaagccaaccggcaactacagaatactgcagaggtatagtgtatgcgatgccggcaaccatttcagcaactgtgtagtcggtttgtgatatcacggatccggaagtatcagtgaagtatgcgcgaagctttgccacacaaggtattgtggcatagtaagtcaggaactccggagaataataggtaaccggctttattgatggttgccatgtgaggaaattctgcgtgaggaaattggcggcagaatcggccaggcggtcaataccggagcggatgacacggaaggttaatgtagtgtcattaatcatagctgtaaaatctgaggcaagtgaggattgctcatatacttgtcctgattcgatcagctggtaagatagccgggcatggacgatatcacgcaggtttattgtgatatgtccatctgcggaaggatcgtaacgctgagataagatttccacaccaccttgtttcagaataaaggaaacctggacatctgaagagatgtggaattcctttagattctgagatagcgataaagcatcaggctgctgcagtatagtcatattgatttctttttatgccaaaattagagatagagaggggttaattaaaggacaaatcaagtaggagttgtcgttgggcgtgaaggacgttcattgggatccttttctgagaataacgctggacgcagggataaatctatgcgataataaacttttccacctgttcgacttgtataatatatataataagaacgatgataataagtacctccagcatcgtaaatagccttggttggtggtaaaggataaatggccggaattgtattctgatttcttttatcttcactgatagtatacccggcagcaacatattcatcttcactgacttctgtagtagaagaaacaatcatccatttgtattctgtgttccggaccatacgttcagattcagctttggctaaggacaatggctcatagagtgaagttgtcatcagttcggatgtaaccggttccgatttaccaccaatggtgtatttaaagatattgaaaagtaattcaactccctggagagaaactttgtgatgaacctgcagagagtttttcagagagtttgggagcaatagatcagcagaaaccttatgcatagagttccgaagcatgttatcgaacttccgatagaatttctcaaaaattccaatagggccattgtataacagggaatatccccatttacccaataaatcatgattggtcccgatcgcataattagaactatattgcacgaaagctaagatcggtttctgatccggattgttcgctacaacatcatcatctgacgctgtagcatcttcaacggagctttctacagggacaccatcaatcgttgaattgagtgtgcggccatcaccaatataaggtgctgtttctcctcttttcatgttgcccctgttggttgttggcagacctggaaaggcaagatatgataaacaaaaaacacagtccggtactttaacttcataggccttgagaggaccgccggcataatagggtatattaccatcggaaagcctttcttcaatagtactatctgcatatcctgtacgacaatagctaccatcagcctctttgtaccaggcctcaggatattttgcctccagttcgtatgtagcatcgtaggtattgccttctgtaataacagtttctgaagagagtttgagctgttgatagccgggaaaagattcctctggttgggatgcaaggtagggtgttaaatcgactgttggctttgaatctatgatgtcgttgaacaattctattcgtacagtacgtgcgacttcatcaggtataaactcacagcaaaactttttgcgatacacatcaagaatggtgttggccatacaatcgggaaccaggtgcgaaagccttatagtgccattaactaaagagtctatggtgttattgatgaagaccatcttactgaaaggttcactcgtggtaagaaaatgatcaagcaaggtataaccgaagtaagtgaagatacgccgcaacaggtatgcagcacgaatgaatggtgaaatgtaataacctggctcaagcttaataatacgattattgacggtttcttttcgttcgaaagaattgtaaaaacgatagctaccttggcctgcattactggctatacaagttccttcagcattcatatagttgatgcggttgacatatcgacgatcgccgtccaagttgactgttattgggaaaattgcataatcaggatgggaattatcgcgaagggaccaacagaagtcaattccttgctgtacagtagtgattcctggaataacttcatcgccaaagatatcggttagagcaacgtctgatatcctggcaagaaaagagccttcattcatgtagaaggaagtagaaatcttctcatagcgttttgctgataaaatggcttgccggcagggcatgaagtaatctccatcctggatgctacagtcgatgttggctgaaggtttgttcttgttggccatacaatcgggataattggtaagctgacggttcaagtccgtatccggaagatcagttggcaaggattgttcaccccattcattgaaaaagaggttagggcgttcgatttcaagttgagtgccaggagtgaggtgataggcttgaccagctttagtattgactattttcatgatgcttgttttttggatccaatggaacgagaacgattgcgaagttctgtcttccgctcgatgtcggaaagaacaactgaagctggtactccatattcatcaagatggatgatggaacgagccaacttctccatgagttctggcggcagtgcagtgcttgagttgccagcaggtgtcggatccggagttgaagacgtcttacttattgatccgccggaagcataaccggccatgcgagcacgaatggcctggttaagatcgagtgtgcggatgttaccggcttgctgggatttatccaggatatccaggataggtgctacagtgggattttcgactgcagcattgctggctacccattcctttgattgaccggcaggcccctctcctactataacggtaggatgatctatgaaaccacgagcgtccggatcataatccgtatccggaaagagtttgccgtcctgggcacgacggacatctattttaccaccttcctgacgaccggtggcgacgcgggcaccggtggaagctccggaagatgtacttccagagagagtcatattcttgaccttatcgcgttcggctttggcactggctaattgagcagcaccagtaactcccattaaagttgcaaaaataggaccagcaattggtccaagttcaccaagtgctttcattatggctacagctgtatcggcaatgatctgagaggctttaattgcaaaattgacatcagcatactttttctggatatcgagtttcttctgagccttttcattctccaggcgttcaacttcatcggcatcacccttggctgcttctatttcagcgtcgtatttggcgtcgatctgatccatttcagcttgttgtaaagactgaatagcattggagaatagatccgcataataatcaaactgttttttataactgtctcgcttgagattttggacagcctgttcgtattcttcttcagtgagtagttgttgagcacgtgcgatcttcaattgctctaactctgcattatgacgttcctgctgagttgtgagcccgtattgattgcgaatagccaggagacgttgctgatattcggattcgagttgctccttggcacgatagtaggctttgtcaagctcagtggtatcgaggttattctcttcggccatttccttccgggcctgataggatgccttgagcacctcaagttgcatcgcataatcttcatcgacagtagtcagtttgaattgatccttaaaacttttgataagttcattcaactgggtctgcagagcagcacgagtaacattggcttctttttcagcattgataacacgctgattggattttcggacgatgtcttctttggtgttggcatcagtaagggccatcgattgggcatcagaataataggactgctcaatcttgagacgggcgtcggcattctgtttgttcagctccaacagcatcatttcgtactgctgcttggtgagtttaccggtggactgggccgagttcagagcagccagagaatcgttgtacgtcttctgctgattctgcaagtcttcttcgcggagagcttcgagggatttcacagcggcctgttcggtagatattttggccttttgctctttttcggctgttgttcgagctttttcagctgcagtatcagctttctttttggcatcagcagccaattttgcggaaccgagttccttatattttttgatttcttcatccaagcgttctatctctttgttcttcaagataatattttctttggtatcttccttccaggtattttgcaccttttctttttgcttctccagctttttaatgattgaggtggattcaacttgttttttgatttcttcatcggagaggcttaccgtggttttgattgcctttatatagggttcatacttacgattgatctcatcaacaccggtagcaaggtttcgctgatcaattcgaagagcgagaaactggtctcggaatttggtcattgcatcacttccgaggtttgaactgaagtatttcccgaacgtattccaaaagtcagataaatcggttttagaatcattgagtaccttttctattgatccgctaaactttgaatatacatctttccctatctgacgtgaagcttcggacatgaggtattctattctgtccatctgaatagatatatttttttgcacatagtcagccgttgtttgagctttcatttcggtggcaatgcggttggtaagggctgcgttggcttcattttgagccttcgttatgtctttgagggaggctttttcgaggttatagtttgccaaaaggcccggatacttgccattgagttcttttacaagctcgatgcgttcgttggtgcttgggttggttttctcgagttcgttgaatatattgttcagttcagtccgctcgctgagaaggcgtttattaagactttcgacagaggtattgaccttatctgttcgattaccaaagagcatgaaagcagcggcagcggtggttattaatgtcgtaacaattccgagtggtgaagccttgagcacaagattaaacatttcagtagctgcagtagctaaattgcatcgtcctctgtaaaggtctaaaacgattaacttggccagaaatgcttttttggataaaccaagttgcaatgcgtggagcttctcggcagcaaccgacttaagtgtactttgtgcatgtttggcattccatattgtcgcaagtttctgtgtcgctatataggaggtgtaggccgttaccaagagaataagggccttgcgatgtttaacgatccagccgatgagttccattgtggaaactgatgcaccggaatagaattcatcccatttttctttgattggcagcaaggtttcaccaagttcaagttgtgcattttgaaaacgaacagtggctgcctgagcgcgatcggcagaagatacataattatctcctgcagctgcaagctgtttatcaacaatagctgcaactgctgacatgaaatcgcctgtctgagacatttgctcattgatttcggcggcagataagccaaggttatccaagatcatgacggacttacgccctaaacctgtaacaatggagttggtcatatagtcaacggactggcccgtttgctgtgccttgagctgggcaaactgcagatatttgccaaggtcctcaagcgggatccggaagtcgttagcctgtacagtagccttcataagatcaagatcggtgacagttcccttggtagctttacgtaagttattgaggatagtcccgtcatcgagcgcatcgaaagccttcttcacaccatcggcagactcggccatttcaataccttccgcaataacttctttcatcttctgaatgtattctccagccttctcggccaacttggcaaatacgatgcctgacatggccgctaaagccgtttcggaagtggatatttcacgcagacttttggcactgaccttgagctcattcatacgctcatcgacttttttgatctggctctccaagagtgcatagcgttccggatccaatgccttggatacattgtccagttctcgatgcaggtcccgggattgtttcttgagttgcgccatcgagaggacgttgacatcgagcttgcgggtgagttcgcccatccgcttgttattgtcggatatctgtttgccgtaggccttgtactctgctgccaatttcttataagtatcgctctcttttttgcctttggattcaagttcaatcatggacttaaggcgttcacgttgttgctgtttgaggtcctttgttgccttagaaagagcataaatttccttttgtgccttatctgtttcggcagaaatgatgtatttgatttcgtcttcagataggtgcttttttgccatatcaattaactgttagattgttcattctggagtgattcttccagtttcttacggatagagttgcggatttcttcggtaaatccatactggatttccgggaaagtctcatgataaagtactccccatacaacacgattgtagatagccagattgctccggatatgccgagatatacgatccttaccacgacggtagttgatatccaagaaacgaaggtagggaaagatgcgcatgtagtagacttgtttggagtcggaagactgtgaagtaaacgggcggcgcgcgaggtgagccaaaagattacccgaacgggtatggagatatgtacgaactacattttcttgtgtttcgtatatcttgctaatgccacgagacatgacatcattgacaaattgggttctaataagttcgtctgtaatcatattcgctgcttatttacagcgaaagtaaggcggaaaagagaatagaaaaaggacagttatcggcggaaaataatccaataaataaagataccgacgatggggagagccaacgacaagataatgtagaagagtttatcaaccgatgaatgaatggaaatcatcggcatcagaagcaatacaatcactatgtaaacgagatataacatattagcaatttttctttatccaaaaatagacaatttattcgacataagcaagataaccccgggaaacttggtatcttttgtgtaactaatacggttatagtttcccgggattctctctactatatttctttcgcctggagcatccagcggaagtctaagcctgcggatccgggccggttctggtaccggtagccggcatcgtgcatggcttgatgaacttgatccttggtgatctgagcacccggatcaatgcgacggatggcgtcgaagacttcatcggtggtaaaccaatgagtcgtatgacgggcatcgggcgccggcttgaatgatgcagacaaggctgcaacgtgaatactaatatctgtgatggtttgttctttatctttcattgttatctaatttaaaggttgataaatggcgactaatttcacggagattgcgaacgatatgcagacgttgagtatcggcatctttaccatatggaaatgtttcttccaatataatatcaattacttcatcgacattggatatcatagcacaaacatagttctgatcttgcatgaacttgatggaatcaatggaagaagaagagatttgtgctccatcaatattaataggatagagtttattgtcctcattggtagtcattgcttacctcctttcgaattaatgcaatgctcagtggcaggatcagctgatatctccgtatccgcacaatgggaacaaatggtctgagactcatcggcccaccaacaggttccatgatcgggatgaaagcatggatcattttcagtgcatccgcaaatacggcagacacctggagttacaagagtttgagttttgagcattccttcgccaaagctataataaccacgaacggaagcgtaagagatgaagcaaacagactgattgtcatcgttgcctacccttacactgaactgaccatcttgtgaatcgaagacaccggcactaaaggtaatagcttttgttttggggtacttctgattgagttcattgacttttgcttcaaaggaacacttcaaagagtccagagcacattgatcagtgatcaacagacgatcgaaagctttcgcaaactcgcacatttcccgcccctttttgttgacgttggaataggtttgcacatgatggatgaagaacatcatttggaacctcctttctttgatttttgcgccataaggtagcaataaactacaactaagatgcagggtaaacagataaatgtagcgcagatgctggcaatggtagcaatgtaccaacggtcggaagtggttttaatttcgcagtcacatagactacggtaataacgctcttggagcgtgttacaatcctgcgttgagcggaatgtaggcacaactggcgtgccttgacctaatgttttcatatacgaatcgtttggtttggcattaatggcaagttttcgaatacacgaacggctgtcattttcccgttaaagtcgccaaaccaaacgattcgtgttcccgaaggtccaagaaatggaaaagacagccgtaagtttcgtatatgaatttgcatacaacataaattgcagcaaatctatggacataaaaaaagcccaatttcgtattgagcgtctaccggacgcaacgggatagattactatcgtttgatttggcactgcaaatatggggattttattttgattgacaataaaaaaacggagttttttaggctccgctttatactatttataaacatcatcccagccacttttcttcgtatcttcagcagcttgctttctctccttttcttccttctgctcctgcttgtattcgccaagtagccttattccatccatgatggactcaccgttaccgatttccttaaataagatataccggtaagtttcggcaccgccctggcctttcactgctgcagagaaagctgtgtgaagtttccagcctcgattggccatgtagttaagagcgtcgatcattgatgagaagtcaatcacttcaccgtctgcatcaacaatctgattgtcactcgatgccttgtaatagtacttctgttcgccaaaatcaaaagagattttgatacttcggccagaagggcttccggtcccgatcatttcacaataaacagtgcgtagttgtgcatgagcagacaaggccaaactcatcagcacaaagataaatagtacttttctcattgtatattatttaatcattatatttttgcataaagtttcaacatcagagtgtggaataaggccgattgctcattgatcatgtagatcgtaagatatgttcagtccccacacttttacatcagaaaccggatagttcaatgggctttgaccccgcatttgcaatgatggctcaagatgtatagatgtttaatataaaatattaagaccatgacttacgttggaattgatgtcagcaaagcgactttcgtagttgcttattcttctgctaaaggtagtaggacaaactctttcaagaatactatcaaaggtattcatgagtttatccaaaccatttctgtagcggaacatcactgtgttttggaagcaaccggtaattatagttccttactagtttacctgctttcagaagcgggtatagctgtcagtcttgagaaccctctaaagattaaaaactttgcccgtgttatgctctccatcaccaagactgatgaaatagacgctcgcttaatcgccatgtatggtgagaagatgcagccggcaccttacaagttgcgtagtgatactattcttgtcttaaagcaaaagcggacggtcatacgtcagctcaagaaacaactcgtagcaactgggaacttgaaaggttccatggaggcacttccattctttgatcctaaatgcaagaaaacaattgaaaggacaatcatctttcttgaaaaacaaatcaaagagttggaagaagaattggcttctctggcgcaaagtgaatacaagaaacagatggatttgcttacttcagtcaaaggtattggtgttacgctggcagccgcactaattatggctacgggaggcttcacctattttgataatgccaaacaactcacccggtacttgggcttgtcacctacttaccaacaatccggtacgtcagtcaatgtcaaaggtcacatcaatcgtaacggtgattcttccttgcggagccaactttatgtggcggcttttgcatctttacgatgtaatactgaatgcaaggcatgttttgaccggttacgatctaaaggcaagccaggaaaagtagcgctcattgcagtcgctaacaaacttataaggcaagcctttgctattgtcactcaagaaaaactctatgtagatgggttcaagcctgagaagccataaagctcctgcggagggaacgccatgcggcaaggggctgagcaggcagccccgacgagcctctttaagtgcgataattgcataactatgctaattatagttaatcatattcgattttcttattatagttcatatcttatagtttaaaatctaatcctaattctttagctatataattagctattggaataactttatcccaaccaccacaacattcgggacttaaagcaattgtgacgattgcaattttcttactttcttccattgcattctttaaatcctcaaaaaggaattgtatatactcgttagtcaacatttgaaaagcattagaataaaagaaatagtctaaatctatattgataatccaacgattatctttatctctttcaagtgtagcatatccccactttgatgcattacttatacttcctaataaattgatattattaagttgaggaatcatatctaattcctcacaaactacataataatgacaagcaaagcaacattttctaaaccaatttggaaaaagcctttgagtttgaagaatataattttcaaaactaaatgcctgtttttcaccagattggtaacgcatggaaagaaactcatttaaggaaatatgagatgtatctttaatcttaatatatgattttactggagcatctgaacataaatcttcatgttgatctatatggaagaaatttaagttttcatttttatctaattcctggatccagcaatatgcagccgccaaatgattatccattataaaaacgttcccttgtttatatataaaattcacattataaggccctgtttttttatttctgatatcaataggttcttttatccaaaatccttgagttgtgttcataacaatataaataaattaatctaatataatatttctgttatctatgttaggagcagaatacttgaactctgtgttatgaaaaaaatgttttcttattttatcaaaaagagagcccgtagatctcagattttcaaaaaaacggtagtaatctaaccattgcaaatattccttattaccaaatgaaactacattatagaacatgacaaatagctcttcattactcatctgagcttgaataatattgatatattcacatttctttttgtagttaaatgaactattgtgtactaatttcacaatatgatataaatgtcgaaaataatgcatagcagagctgtcatcaggttcttttagagagagattatacgctttacggacgcgttcaaaagcttcttcagaggatagttcttcactccatgacagtggatagtacgtcatgattttttcataacgttgtttgaaaaaacaaacaccaaaagagcttaagatttctctttgtgtatgtaacatattgaagaaagtgctatcaaattgtagcttatagttagaatctgattgcttcttatatgttagatagataaatgtaagagaaacgaaagtaaatagagctgcaaggcatgttgaataattactccaatcatctaaattatcagatatttcattatttgcaaatactttaacaaacttaaagcatgaaaatataacaacaatagcaaacagtgtaaataaactcaatgctaaataatctccaattttttttttcatttgtatcagattttaattataaaattcacaatatatgataacagtagcagaatatactatcaaatatggccgaaaactttttactcggaacaaatgtaacaaatttatttgcataaacaaacataaaaaggcctccaacccgtggaagcctttttgagcagagggaagactaatagtattcaatgaacactcagtgttctttatccaaacttcaccctcaattcttgtgtttttaaaagcgatgcccctttaacaggatagcacttttctttatacgttcacttaggtctaacagaccatcagctaatgtatttatatcttctgggctaaatgctgcagcttttgaattaacatgatatccattcatgcgctggctcaaccatgaacgcgatttatggaaatactcttcagcaatatacgaccaggttatagctggaaaaatatcatgcaatgcttgtttgaaatgatactctcctatcaacgcttctgactgctggatcatctcttttgcattgtctgcaagagcttctccaaattcatgtttttcttcttctgttttaccagctaagatttgagccatcgtatcccgaaattgctctcgttgctcatccgtctccagctgaagaaatctattcaacaaattgtctatttcactttttgcactcataatcgtttctttatttggtttttaaagcaccccctcaattcatgagggggttaatgttagtctttcagttgtttgaggagttcgattaacttatccaactggatatcgattagcctctctaactctcttcgtgggtatccttgctttagcaattcctcctcgcttagagcataaaactgcaagcatcgctttacatgttctatgtgagcctttagctcatcctgattgtcaaacatcgctttaaaaacacagtgcaaatataataaacatttgtttattgacaaagcttatggcaaataaatgtacctatgaaatgattatttaacacttacataaccgtatgtggataaatcctctaagaagtgatctgaagaatcggctcggatcacatggccggtctgatcgtgaaatcggtcggcaaaatggtacatgtattcctggtcggtacattcactatcgaagcggctgctttcgcgtaacttggttacaaaatcggcggcgcaggtggcggtaattttaccgccgtcctgcaaagtgtaggttgttgtcattattatgctaactttttggttctgagtttgaaaaatattttttggtcggcggttaaaaaaggaatgcttgatagttggcatcctgcgttaaccatgccttgttgtgcaaaggtaatcatgtttgcggcaaagcgtatccaattctccatttttgtgaagttggttgtaccgccatgttggcgaaattcaactgtgcggtggcgggcgtaggcttcgaggttcagcttgtggtagcgggcgtttccaaagactgagcgtagctgtgtgatgttttgggcctcccgaatgcgactttcagatatattggaaagagttttgcagtagatgttattgcggcggttgctcggcataaatccgtcgattaccggctcgaggcggcggtaggttattgccaagttgcgccaagtctcgatggtaaagtctgcagcgtccatgtggatgtgtaggccgcagctgttattcacttttacattgcaatactcaagtacccagcaaactttttgtaactcctgtagtccggcctctccttgcaggatcgggcttaccaactcgaaagtgttgtttccgctaaggctggcgtctgttacaagcttccaatggtcgcgcgtgtcatggttgtaaccctcaactactacgttgattccggcctcgcgaagctcgcaggcgaggtgatgtttatcgcagttataggcttcaatctcgatgccgaagcggcggttaaaagtgtagtctatttcagaaagaattgcagctgcaggttgatggttaaaagtgcctgcctcaagcatttttttgtaaacgttttgcacgaaaccgtagtttccgttggttaccaagtcagctacctggcggcgggttaaacctaaaagaaggagctgttgtattttcgctgtcttcgttatgttctgattgagaatgtttgtaacttgttcgttcataatgatttacctttattattgtacagctaaggtaacactattaacgcacacgacgtagtaatatcttctttattatcagctacttagctttgtttagcttgagctaaaaagtgattagtttttgcgacggaagtaataaataatggtagccaggaggattaaaataaggtagggaatgaagggctcgtaccaagactgggctttcacttgataggtcgtttctgcctttactatttcatgagattgctccgaggtggtatcggaactggcgataaactgcttctgactgattgtggaatcggacttgcttttggaagatagatcgatatcggttacagatttgaccggaccatgtgaggctgtgtcaccagtttccggagggaagtactctacgatccggacggcgaggttagattcttgctcatgcaggtagcgggcaaactttgcattgaagtctatggaatctttccgggtttctttgaggtgggtagtttggacatcggaatgtgaggttcctgatcgcgaacttcgacagcccacgatcaggagtaagataaacaacacaatcaatatattatgaacaaaattcatgataacactatcttaagaatggattgtacgtgaatttcagtaatagccttcttaccttcaggagaaagaagaaaccgacaatcttcctgattatccatgaaaagattttcagtaagaatggccggacataaagtttcacgaaggataccaaggttagtgtcccaatccggatcatcatcggaaaagtctgcacgcattggagtaatatccttcaggatatcgtgagccgtattccagaaaatagtagcatattcatcggatttggacttaccaagataagtgtgaacttcccagccacgggctttaccattgaaggcattacaatgaatagatattagaaaacaattacgaataccaactttcttacaaatactattcacgcgtcgagctcgctcgcgaataggtacatcgatggattctcgaacaattagttctgagtcaattccgagttttgtaagttctgaaaatattctactcgttatttcacgagtataggcccattcaaataattggctaccatccggccaaagtggtgaacgtttacctgctgtattctctccatgtccattgtcaagtaggattttcatcttttacctcctttttcttaaagattcgtacctggtatcggtaatcaactccaaagagtgctccagcgaatgtgctgacctctccaaaagctaccaataccgaattgtgtatctcacctcgaggtgaaacccagaaaccactaaaaataagtaccatacctgaaactgtaaggaagacagcgacagctaattgtaccgtgagttttttcattgctttcattttcttgctaagatatcggggatttactattctctaaaggacgatttagtatcgaaaagatcagctgcagaggaactgaacatgagtgtccagcctatggatttaaactccggagaaacaaaaggaacgatatcgtgattatcggatattttatccagccaagggcaattttccgcacgagagtccaggatgagtttcttccggagagaagcaagaagggataaggtgatatccgaggcaatggcgacttcgatcatatcggctgagtcggtaagcttcatggcgatagtagccgccagcttctgttggtctaaaatggagtttcgggaatcccgggacgaggagaattctccaaaatcaatgaagagataattacccgtgatatcattcacacgcctttttacatcatcgtatgattggccgaaaacaagattctcaagtgctggcatgaacggtgccggaagtcctttcacgtactcaagcagagcggagtactgtgggaactggcttgccccattgctaaacatggatatcaccccttctttctgagggtattgagcgaagtactttaataatttcagaatcatagtatatcatttattatgtaaatgggtaagccggtttcattcgcaatgtctatcttttccatcttagctgagtgaaggcttcggacggtatcaatgagtttcttacgaagaatggtcaagtattggagaatattcattcgctcgacggtataaacgtcgccaagaccatcagaactcaagttatacagagactcaagagcaccggtagaaatggcagactctttggtattcttagcctctgtaagtaacttgaattcggttttggtaaatagataattaacgaatgcctgaaagttaaaggcgatagccgtcaactcatccgtcggcagatttacaaacttgtgtgcaagggcatgagctccatcagaagagtactgctccggatagtaaaggatagcggccagaagtggaagttgatccagtgatccgccgattagggagcgagcctcgataaactgaagagctgtcaaagagcaagtgagccggttgaacgaggtgtctatattataggctgaatacagctcgtcgtcatcgatgcgaattgccgggatctgctgtttacaaaagcatgagtcaacagcatagttataaggctgcttactcagatatctggcaatggtgatgcctgttaggcggtgtggaggaatgcgcttacataactttcgtgtttcaaaatcgaggtcctgaagagcagcatcgttatccggatagacaattgtgaatggaaatgttacttgctcagccagccaggttaagttagccaatccatcagagtcctttatttttttgagttgccaccccataacacgacacacatagttcacacggaccatagcaatagagagtttgccttgtgccatcaaggatatatcatggatcagtgatcggaaaagatatggagtaaggctttcccaggtattaggaatgctatattgaactcctttcgccataaagtcaatggtaggatttagcatggcatcactaatattatgtcatcaggacggttaaaagaagtgttagtatcaacggatccggaagaatccgaagtgagtatcaggtcgatattggctaattcttgtttcacttcatccattaatgaggcggataaagcaagcatgcgttcctgctcatcttttccggatcgacttgccttggaatcatcgaacaggctccggatcgtaggcggaaactcaatgatatcaaaacgtcggagtgcaatggcaatggtttgttttgccaggcatcgatgaagcatccgcaatacatcctctttaccttctgctcgttcaaagtaggcggataggccatcgtccagagcttctttctgaataggtattgtccgaaagaaaaagagataagagaggtcgatggagtatagcatatcgaaatcttcggtactttgaattctaagtccatcaagaagtttcttgtagcgggtttctttccaggaagggaatttatcttcagtatcgagcaactggattactgtatccatcgcattgaagtagttttcaataaatgagcgacgcatggtttcctgctcatgcttgtagatatcgacattatttttgcgtttagaaacgatatcgaatatgagttgctttgccattgtcaaattggccatagccatacataaggccttctttagctctccatcaaccttcacaatctcagaatagacatctttcgttaatataataatcatcatctttttggctgaaactgctgatgagttgagctgatcgaaagttatattactttcggcatacggagcgtatttgcgaaactccgcgatggtaggaaatagttcttgtaatattgtcatgactgttgcttattaagtctatctttgggggatacttcttcttggcgggccggaacttcacgatagaagccaaggcgatatccctgactgtataaatcgggaaagtttatctgcagagcctggttaaatggctctgtacaaatttcgtcttcagaggtgagcgacataatgtagatcagatagttgtagtatgcatcagcacccgatttggagataactccatctttgctgacgctcgaaattgaagaatcaaggcccacactggagagtaagacttcgtcggcacgtttatcgtaggatatcagggcgtcgatatattctttatatttcaaatcgacagtttctattttccaacgttcttcctcaccctggctgtttttaaaactgatagttgcataggcttttccctggttatccgctccggaaagatagcgggatattttgcggagttccgactgcaaatatttgattaacgtcgattctttgaattctgtaccaatctcaatatcattatattttaaaagttcctcattgttttttctgcgtcgcttattctcatcacagagcttggtgatttggatacgtttcgactcaagccaggcattagggataattatatgaattttagcggccagagagttgcggaggaacgagtttatataatcggcggtatcattggagcctttgatatacgatttcgttccggcatgtgtttcattcaccccgtagaactcatcaacagatttttcacgatggtgtgatatcgctgcaaacttgtaattaccaacctctgtcagattgaatttaggatagatacggaaagttgaagttccgtagccccatcttcctactgctatatgtcgaaagtccttataataaactatatcggtggcaacatccttctttgtcgtagccaagcggcaatgcttattttccattatttcaagaccggcaacaggaagtactcctctacccttccctattgtaaatcgccattttacaaagaaatcacggaaatagtagtagttcttaatgatagatttggcaacctctttatgatccgattcgagaccacgatccttccagctattaagccaatcggtgacagtagggcaatcaacccattctttctgcaatttgccatcgacaatcgtaggcttgtacacgctaagcccatgcccatacaacatattaacctgcttggttatcaagcgaggaagtagtcgattcttcttgatatctgaggcgatctcttcgcacttcagattgttgaagccacgactacagacttggaatccctggatgctttgccattgcatatccggaaaattgctatcattaagtaccggaaacataggatcaggatccagcactgacgagagtggcgtatcaccgatttgaaatgatattacattatcgtcgtcaagatagcaaccgtagttgcctaccattttaaggttgcttttactcatagccaatctattttatgaagtttgaaaccatcttgtggaaagcccatataccggatcagtatgcggtagcacatctttggctcaccatctgcatcactgaagagaaagaagttatcactatcaatgctaaaccgttcctccggaagttgggtgcgccatttgcatccttccttgaccgtcagattaggtattgcctcccctctatgccttgagcatgggaagaaggcaatggtgaagcatccattagggagcttcgagatctctttagcccattgcatcgcctgaatacctgtcatcgtcatttccatgcccgaaagtagtgggtttcggggtgcgccaaaaggacgcacccggggtttgtcatattttcggaattttcgggagggggtgagcggcaaagggaaaactcagcggtgcgtgcaggtatgcgccttgcaagaaaaatacgttttaagttttcaaaagcaaagagctatttcccaaagtattagatattattcggatgtcaaacagtcccattattatacttttactgatacatttttagggtgaaaaagaactactatatagcaaagttatcgggtaaattatccggcattgatgataattcgctttgcactttgtttccatagcggccaaaaagaaggtaaattaaggagctgggaagctgtgttgttagtccggcctggttctttaacggtactttcttttctgatgatttatcaagctctatgcggccctctgttttcttcagtggtgacagcatgatagagctgcaaaggtttttgcactcgttttcatctatcaagatttccggcagggcattactgcggccaccaaaaataagtagcaacagtttgaattgttgccaatagtaaattgtagactggccctcgttcattagttcaacctcgaagccataactttcaagctcacgctttagtgcccggctgtcagtggtgatttgctccagttcttcacgacgtttgttaccggcacggtcgggatatagaataatgcgtttgtttatggagtccggaccaaagaactcatagaactggcgggcgagttccggttgttcatctggataacagcaatagaactcttttaggatccggagctggcgaccatagtttttttcctgggcaacagtcaaggaagaaaagtggccgggatcatagccaacgagaagttcatcgtgcttactgtaatacttcaggtaacgagccgtgaggatgaagtgttcccggaggtcaagtttcaggatggactcgtaaatatagctatcggcgaactgatgtttttctttgttgtagttagcaaagaatttgttaattacttctttgtgacggatggcacaaatagaagtaaggaactcatccatatcgagggtttcgagctgggttttgaagaatttaggaccaagaatatccttgttgcagaaagaactggcacgaatgtaaagagttgcatttcgacgcatgtcggccaggcgtggtttccaaagtgcaatgatgcggtcttgctttatgatttcgagacggatgtgctcaagagtaacaggattggttgtctcacgctgtgaatttattaatctgtatttctgatagatagcggcatttacatgaagagcaacagtagctatttcttcaagcagtttatggtccatgtgtttctcatattcttcaaaccaatcgtcctctcccaagtcaacgcgagcggtatcagatacaccggtgataccttggtaatatgttgagcggcggatttcagcactggatccacgaagtgaagggaacaaacgggttttcagtttttcacccttgttgtgcttcatttcttcgatgattgcatgaacagccgatcggcctgcgactgattccggttgatcggaacttactaattggatgtggtggccatcacggaaaacaacgctgtgcttggggtacgatatcggatatcggggacggcggaagtgtgaagggagtttggcttcaccgactacataatcgatgccgtattcaagcatggagcgtacctttccgccaacggtaacttctttggagaaatatgcctgtaggttgggccaaacattagtcatgagagcgacgtaggtcttatgtaccaggaaggaaagttcaccgggcatatcattggccacacgaataatgcgaggaccggtaataccttcagtcttgccaccggcgcgtgcaacttcagcatatagattattcggatcgattacattagccaagatttgcatctggttcatgtagtaggattcgaagctcgttgtcgcatcgaaggttgtctctggagatgagagagagtttgaagattggctatacagttctattcccatgttattcctcatttagttcttcgtattctgcctcctggatatcagcatcacgaaggagacgttttttctctactttttcaataggaaggctgtcgatgagattgagataaaaacctttgttatgcttggctgcaatttcttttaatgaggccttactgtatccaaggtcttcagaactgagttctggagagataagaaaaacaatacccaagtcacgatcagcttcagctatttcggaagcacgacgacgacactccagggcggcggagtaacacttgcccattgttttatagtcttcagctgcagcacaaagcttggctaagtcttcgtacttgtcggcatagttggactcccatactttgatagatacattgttatcaatgctgaaatagtttattgcagcatagatgcgggctttgcaagtacgttcatcaatgtttatctgctgttgtgcattgatgcgttggcgtagctgcttggctgcacgagttatgttacgttcgtactcatagatttcggcagcccattggagctgcttcaaaaagatttgtacgtcgggcgcaattccgtcacactttccggtagtgaggaaagcggatattaggtccggatgtatcttatcaagggtgtcgagtttattcatattccaaagagttgattcctaaggtctttaacagtacgttctttcttccgagtttcaagtgtttcaatagctgtcacatctccagcttcggctttcttagcaagctcagcatctatgttgtactcgccaagagcacatccgttgcggtaggcatcgttgtaaacatcaccgggcatggcaaggcggatggttagagctatcttctcttttccacggagaccgagaagagagcaaatgcgatggggagtgtatcccagtgcgccgaaggtgcgcacttgagatacatactcgtcaccgataagggttgccttatctacatcggaggttggggtgagttcttttttcatgttaacagggatttggtttcttctgctgagaggatttccccattccggatcagtcggatggtttgttcctggaacatggcacgatatcggtggattgtagctgtgacataacgcggatctatttccatcgcatgacagatacggtcgatttgttgacaggccatgagggttgatccagatccggagaagagatcaactactatctggccgggagtgcttgaattggatatcggatatgccatgagggcaataggcttcatggtgggatgaaggcttgagcgctgtggtttgtcgaagttccagacagtggtctgcttacgatcggagttccattgatggccggcgccaggtttccagccataaaggcaaggttcgtgctgccattggtagtcttggcgtcccatgaccatcgtattctttacccagatgcagcattgggctattttgagacctgctttccggagagaggcacggaagttctccccttcactgtcggcatggaaaatataataagagccgccaggcttgagaatggtaaacatgatggagaacacttgcttgaggaaggtggcaaacaaatcattttccatcgagtcgttttggatcgtaagttcatcttcagtaccgccttcgtagttgacattataaggcggatccgtaacacataagtcagcatgctggccgttcatcagcgcagagacatctgatttggatcgacaatcgccacacatcaggcgatggttgccaagtaaccagatatcacctggttgagctacaattgcggtggtatcttcagctgcaggaatgtcgaaatcgacttcatcttcatttactgcatcggattcatgctcctggggaaacaatggggagagctggccaaagtcagtggctttgacttcgtatccgaggttgaagcgttggagggtatcggagtcgatattgtacttcttgaataagagggtgtccgggttcttagtggcgaattcggagttgtaggcggcaatctcttcgacagcttcttttttgtcaatggcgaagatgggctcatagggaatattggggatggtgaaaccagccttccgaagtgcgatcagtgctttgcggcgttgatgggcatcgatgatccagagttttccgtcaggatccttccaggctttgaatgcgtacttgaaaccacgagtgataatgagcatctgtaatttcgacaacttatcaggatccgacttcttaaagtcttcctgaagctccaagaatgaatccagcggggcggtcggtaaaccacccaaattaaatacttctattagcttttccattttagtcttttgaattaaaatcttgcaatattgctttgaatagggcctcacgttcacgatggcggcggaggttctctttgtcctgagagcgccgagtctgccgatcggctcgcttcaggtaagattcgtatctgcggatgttatccgctacattcttgtgcaggcgtaggaactcatgcggatccgtcttcagtaacttcgtcagttgcgctctctctgactgatgagttatgagcggatgaatgtagaggaacttcccagtgtcgttgaacgattgcagctcatcgaaagcctgcaagtttcggatccggagttccaccatgtctatgatgtcacgtttgaccggtttcttatccaggctttcgtcgagctgcttcatttgtttccaagtgaccacacgatcgttgtagatgagtgtggctatttggacttgcggatcgaagaggttgtcccagtcgatttgcgggtactcctcgtgcttttggactttgctggagctgctttgggctgctctttttttttctcgatatccagggtttgttcggcttcttcagcgcgagtttcagcttcttcctgagcctcttccgcttcttctgcacgttgctcggcctcttctgctctttcttcggcttcctcaagggattgttccaaggcttctattttcgccaattctggagtgttttcgtcagtggtaccgatagtctcgtcagaggctgaagtatcactatctgtagtggtggtttcatctgaaggagtattcccggcatcgataccggcagtctcatcagaagttgaagtatcaccatctgtagcggtgatttcgtctgaaggtgtattcccagtagcggtaccaggaacttcagtagcagctttcagctcatctaactttttacgacgaaaggcacgaatgctttcccgagtcgtcagatccaggagagaatagaggatatcacttgcatatcttttcggatcgcgagcataagttctcagttgaggaagccagggacgaacttgtcgcaacagttcaaggtcatatactgcagcatccggattgcggagggcattaaaatgaagtttcttttctttgaaattatacatagcttgttggatttgaaacaagctaactcaactgaattttatcagttggttagcctgttaatgatgattaagctgtctgaacacgcgttccttggacttctacgagtgtagccgggtccataactcggaatgtgatggaggaaccggccttggccgtccaggtggcaccatcttcgagagtgaaggctgtaccatcggcaatagtggcagctttgtcagtaccggtaccttcgagagtaatgtaccggcctttatcattggcagtgagacctgatatcgcattgatggcgtaagtcgctgcggatccgttcgggatttcgtaccggttgttctgaggagatatcgccaaggttgctgagtcagccgcatgcttggctgcaggaacacggataatatcgccagcgtacttgtaatattgatctatgctggtacgtttgaatgtgaaagttacatagcggccatctttatcatttttggactcataagaagacagtaccattggtcgatcataattgccgagaatataccattgctcctctcctacttctttgaatatgacaatgaatttgccaccggcatgttcttcaataaaagtgagaagttggtcgcgcatacctcccataatcattacgaaattattctctccactggtggtgatatcacctttttcacccgttgatgtatatgtaggtatatcatgggcctcaaaatatttcatatattgtccggtcttcataggcaaagtacctatttccctatttgcattaggcttcggaaaagttacatctgggttgatttgggagatttcaatcaaatagaccttatatgctatattcgagccatgagtttgtcggtcggagacatctccaacgtcaccgatggccatcatggcggcgaatgaagtgccggcgaaacctgagagacagaagggagaagatgacggatccagaaacattcctataacgaaggcgaatgcgatcaatgtcatcagtgagagaaagaagcggagctgcattttgcgagccgcttggtttcctttacgaaaaggatttgaaattttctttgctttcatattaaataaaatgatgggttaaaaagaaaagggcgggccaataacccgcccctgtcacctaaaaacaattaattaccagattaacaaaggttatcttacacctggaatgttaggctgcagtgcggcgttgactttgcggacaccggctacctggcgttcgagttccaagaagtttcctttgctgttcaagattaacataatgtagtcaccgaccttagtaggtgtatatgcttctgtgatatcggcaaacttaccggctttagcaatagtggttgcattttcggttgatccacactcgatgatataagcgacaccggctttggcattagtgatatcggtaatggctttggctgcagtattggctacagtgatttgccagaaacctttggaagcatctacggtggtggcatcggcttccatgtcaacagcaggtttattcatgaagatttgctgccattcgtagttgtttgccttaagtttatccaggctgtcgaaacgacggccggtaaatgaagctgagcaaccttctttccaagtagaccaggcttttacaagttccatgtcttctttaaccttgatagacagcatttcacccggtacgtattccaggaactgaatgtttccgggcacatccataaacatgagaggaagctggccaagatatggaagccaaatgatgtgtacgttcgtatcaggaacaacatacttataactgtctggtccggtgaagtcgatatccttaccatatttggcacgaacgttcttgatccaccaaggctgatgggttttgttcaagtacagaacatggttgtcaatgtccatatcttccgtgcaggaagtaatgatgtcggcaacaaaatcctgaacggcatccaacatatcggcatcggtatatccacgataagcttcatcatcatgaggaagaatcttaaactcatgaatgtagcggagtaatgtgtagataacccctgtagaagcattcagatagctacctgcaacgcctgtctccggttttacatagataccacgcatacggcgtttgttttgctcaacctgtgcagtttccaaggaattaaggatgcagaactcgatcatgttccacttgatcggatcagaaccctctttgtttaaataaccgatgtacatgcgctccagttccttcattggaccgaacttgagtttgatcatagcatcatcaacatgtcccatctcgttttcgagcttcatgtcacccttccagatttcaccttgctggtaggcctgggaaacttcagagaagaaagcgttgaatacgaggtcatgatcctgaatgccgtagcgtacagggaagtactgagtgaggtcacgtttcgtgagaacacgagcaatcaaggcatcttggcggagaactacaaattggttaccgactccggcagtattaacgccttcgtaattagttccaaattcaccggcagccaatttcttggcatcgagcatgccattggcgtgcaaataggcatagcgtttttgcaaggaacgggaaaaggctacggcttgcttacggaaggaaacaccttctgtttcttcgtcccaggcaccgaatgaagctgccgctgccgggttagcggcaatacggttccaacgatcggtcatggaaaacatagaattttcgatgccaaacaagaacttcgtgcgatctgcaggacctgtgaaactggtagtggtagtggttaccgtctgaatgggacggtcttcagtggcactattttgcatcgtgttgaccaagccttgtacggcttgagcaagttgtacaatgtcggtaccggttgccggagtttgagtagtctgcactaccggcttttcttctccactttgagttgcattctggcctggattaacaatactatccaaaatgccttgtacctgatccatctgctcttgagtgataggagtatttgtagcagcatgagctgccatgtcggcggctaagtcatcctgaagagttgattgatactctttctgataagagtcaacaatctgtttccattcttcgtcagtcagctgattggcttttgctttgtccagcagcttcaatttctgcaggacggtctgaattctttctttaatattcatgtgaatgaaaaaattaagttataaatagttgagagcgttctttttgattgtttccaagttggtgtagttccggccaaggtctacagcgctggcaacggcttcgaagaaggtcatggatccatcaatgagtttcttttcgatggcatgagttgtatcgaaggtctcgccccggaagacaggatcgtcttccgggagctcacccagttccggacggcttgtacggacttcgttcaggaactgctcagtgagcggatttagcacatctttgacatattgctccggttttccggcacgcatgtcgttgtacttcttattcttgaggtctgatttatcagcggtttgcctaatgattttaatgccgagcttctcataatagccgctaaagtcataggtctcgaccattgtacctatacagccaattacttcgttggctgtaagtgcggcaataacattggaatggcaagtgatgtaataacaggcagagcaattacattgctcgacaagggttatgatgggcttattcaacgaacgcatggtctcgctgagtctatcaagataccaggcttcaccacctggcgagttggcatggatgaagtggcaggaaatagccggattagcttcggcatccaggatatcccgttcaaattgcttggaagagaaataccaacgactatcagcagtgataaaaccccagatacgatggtaggcgatactaccttcaggaagttcattggaagaaaaatcactggtaaggtttacttcttggaactcggaaagtgcatgcagttgttgctggattttagcaagggctttatccgccaagtctttatatgtaggcggatcatcgtcgaagaagaaagccgatggtgtgggtgcgtcattggctatcaaagggaaagcatccatcatggcagaagtgaagccttctgccgagatgagaagctgttgagtgtttgatagaagaagctgtcggagaaaagttctgttcattgcatatcttttcagcgaagataggcagcttgcagaagggggtgaaggacgctactggagaggtgatttgagcattttacactcaattttcagcgtagcggagttaagatttggagaaatggatacgatggctggtatcttattatccccaatactgaacttccggtaccgggtatcccgaaattctataatggcaaacttgcccgaagaaaaatcacggataacgtcagctggtggaagatcgactgtaatctctttattacaattgtagcacctgccggcttcggaatcttccggtaccggcgaaaaagtaaattcatcggcaatgaaacgatagatatcctgacgcatcttggcgatgggatatacattgagttggatggataattctctcataatgattatattcatttgatattcaataagttcgccacacataggacattttgtccgccattttgggacaaaatgcatagttcggtaggtgatttttcatcccctttttaacttctttttatactctcgacgtctttttctttttcgaatgttttcccgccaccgatagaagttttttagcaaggcatcttcagtaatgctgtcaatacagtaggaacacaggaatttatgaacgatatcgaggttgttaagctcatgaccgttcaagtcattctcatccatagcggtgtgaaggtcacgattgaacatacgacgtacttcattctctatgaccttggcagctcgtggagaaaggtaattatagacttgtgggtcctttcctatccgtcggtctgggagaacaatagtaagattgccattgtccaccggagattgattctgatgacgacgggccatcagggtccaaataacgtgatacaaatctgtattgtcaggaattctaatgggttcatctgcgccattattatattttccacgcagatattcagcaaggtaaggtgtaatcataatgctcgttgtaatcatagctttttcctctaagaaatatttttgaaatcgtttttgttatttttgcttccaaccgtccaaccgtccaacaaaggaggggattcatatataaagttactgattattattgagttagcaaaatttactattaggaaaatactgttggatggcgtccaacacgtccaacaaatggctttttttgctgtttttgttggacggtgaatgttggacggttgaaaatgctcaatccaacacgtccaacagcgtccaacaaaacaaccactctgtagtatatatatataattaaaaagaatatatatactactatacaacagcgagttacattttaaaatgttttttgctgttggactgttggactgttggacggtatttatgaaaagttttcctttcaaaactctctctatttgctctcttttttgtttcagggggtacgggggatttgggtgtaggttaatagagtaatatagattaaggaataaggcgcgaaatgtccgtaaatcagaataaaaaaagcaattattcccgatggggtggccaccgggaataacgcattgtgagaataggaatacttcagataccatcagaattcaatgtcttgaggtgcgccggccattccgatcggatcattgtccggattgggagtagatgattctttggttacagaacgcttaaagtctataccatagagttctctgaaaatttcgtaattcaatgctatacagctcgaattagtgccttgtttctcgactttccttaccatattattatcgatcttgatatcgataccggtttcgttgggtgtatcctcttcaaatccaccacgaggaacttcgaccacttcgttccatgtgaatcgacgggcatgaatgacgccgatgtaactcgggttagagcgaagattctgttcaatggtggattgcgtagattcttcctggctataagaagaacgtgcaaattgagtgtagatattactaacacgtaggaagagtacccgattacctgcaggaattggtacttctcttttttctcctccaggaagtttaatggtaagcttgtcaggagtatcaatagcgaaatcacgtccttcacggatggccttagtgtctaccatgacatccatagccttgaagaaggtggccaacttgtctgtcttgctgatgagttctacttggaatttaattttattacaagcgattttgaaaaaatctttgtaggaaaatggaagtttcatatctgtataattttcgattaagttgcatgttgctaaaaataaagaagctgttttcatgagacggtctatttctccagcattaggaagggcacttttaagttcatcgtaggctttttgcttgagtacccggaaatgctccataaacaatggacggagtttgagaatatcaaaaagaacgttagaaagacctatcttggccggatcctcaatctctttcaaagtattaaatagttcaacttcttcaggagttcgattcttaggtttaggtacttcacaaactataatacgtgacatcaaggcgttatcatcacgttgaggagtttcctggccacatattataaccggcgcaaagaccttatcgttttcaatttcctttccggagacgccttttcgcttctgacggccatcaccgtcgtaaacgatacctttcagtgcttgaaacttttgatctgaaatatctttattattatattcatcgagcactaccggtacgtctctgaaggtactcatcagcgtggacatggcagcatcggtaccaatgttcaagttgaagatgggtattttgggagaaatgaaaagggaacggatcgagattgcaatctgagttttaccggaactcataggccccataaagaagggagcggtgaacaggcggtcaatgcagtggatattactacggaaagcacacataatggcaaagaggacagcccatttaccattgtcgttaatcttgtagacatcgtccatcagagaggcccatcgctcgaaggtacatcttttttctgccggaatttccttatagacaagctgggaaataagctcgtacttgtcggactgacgtccggatccagcgtatatagtagagaatgccggcaaatagtagttctttttgttgtgggtaacaactccgagctcattgaccggatcaaagcgaggcacaccgtctatggtgtgaaaaataccattggcaaatgcgaagaacatattatcttcgcgacgggaaagtccgtcttcctgctgatttccgtaagtggtgacttcggtgcaggttacaaaatgtctactcatatattcacgtattttagtccaatgcttttcttctccgtttgtgaagtttactgcctcgagcatgatcagttcttcttcgatggtagccttcttgagtaaagccttggatgatatttcgatatataatggatttttataataacgacgggttatcttgagtacccgtttattggcttctttgtcgtcggaatagatatgtaaaagaggagtgagatagaaatctccaaccaaggtgtggccggatttctcatttttgaaaatgtagcatacaggttcgtgatctttgtttattttgggataatagccgcattggcggaacatctccatgtattccggattatcactcacataagaaggcaattcctctggattgtattcttcatcgaagtcatcatcggaacgctgagcattgatggccatacgtgactttcgtttggcgagatagggtttcaatatctcagttaatgcagtcttggttaggccaagagcactgtagaaataggagtagttaacgatacgaacggagtcatcagcatagcttataagttctgcacatcgttcgacgaatggtgagtgttctcctttgaatttggtgaaaaagaacatgtgagctcgcacataatatttggcaaagttgaaagactggatatattcttcttcttcattctcctcttcgatttcttcatcttcttcctcatccggatcattgcttgaggatttctttgaggattggacttccacctctactgtaatattcgtgattccggcacggtacactgcagccaatgcagccaaataggaggattcttccccactcttttcgatgaaaagtccggtttcgtctgtcgtaaaaaactggctggtctgacgaaggagttggatatctgtaatgctgggtgtaccatgaatataaacgataggtgcatctccatagagtgtgatgaactcctggtaatcggaagttatggtacagggttcaccattgcagcgagtctcggcgatcatttcaatgccataaatacccggcttcatttgcgactctttctttagtgaagctgtttttgtttgacggagaataccattaattttgcgctggatgacctcggtattggtaccaaagatactggctattgcttctatgcatttgagaagaagggtttctgatggaatgacagaagtcagtgtacagagttgcttcagtgcttcttcttctttatttgggtcctcaccgggatttttgcctcgcagagagatggcgaaatactgaacaaaattctgttcacggttcatgagccattttccggtatcgagtttatattcctgggcaatattgtctgggtctttgccttcaggaagcggaattgcactaacttcgaaaccagcacgaaggaatgcttcacaattaacaagtgaggctttaagacctgcagtatcagcatcgtaaatcaggatcaccctgcgagtgaagcggccaagtaactggatctgttccggagttagtgcggttccactggtggcaaccacattgttgacaccaactgcatgtagagaaagaacatcgaattgaccctcgactacataagcgcgatcatatcgagcaatggcagtacgtgcctggtaaagaccgaatagatgagtaccctttttgaataaaggggtatcgcctgtgttaacatacttaccggtatttggctggggagtaagccagcgtccagtaaatccatttatattccctttaccatcgaaaaaagggaatataatacgatccttaaaggtgtcgtaggtgtagcctttatcattttcttttaaaacatcgatttcgatcagccgccgttcggcaaaaccggcagcaagcatttcttttttagcaagattaccttctggagcatagcctatcctgaaatttttaataacttcatctgttaagttgaaacctctttcatgaaggtagagttgtgcttctggaaggtgtttttcaaagaaggcaactgcacctttcatagcaatgcgctgtgcttcatgctcgcgatacctcgtagcgtcttcatcagtcaatacaggtttagggacctcaatccctaccctacgtccaagccaagtgacagcttcgtagaatgacatattttcgtgttcctgaagaaacgcgataacatctccaccttttccacaaacaaagcacttgaaactttgtcgtgaagagctgacggtcatggatggggttcggtctgcatgaaaagggcaaatgcccaaatagttaattcctctctttcttagggtgacgaattcaccgatgacatctacaatgtcattggcatctttaattcgatctcgtagttcgttatcaatcattatttttctcctcaaatatacagagttgacgtgcttcaaaggcttcttccaaagtgattccgaagtaattggagagcgcgatatactcttgttggttgatatttttgcgtccgtggaaaatatcccaccaacgcatttgatttatgccaacttcacgataaaaagcgcgagttggcataaaattctccggatgccggaacttaatccggagcatctcttgtaccaggtttcttttgactgtctggccaacaacaatatgttgccgatgcatatacagctgtatggctaaaggtgaacgtttcacaatctcagacatttgctctggagtcattttgttggcgttctctctgacaaattggtcttcgtgcggttgccatcttccattgttcatagctttctttcctccatatctgggtataattgttattaaattcgtattcggggtgtttctctatgtagctacagcataacttaatgaaaagctcctgctgatccggaataatcttttcttcgatatcgaagtaacgcatgaccttgagcttctcaaggacattgtgaaccctacgttcgaagtcaaggaaggcatcggtacccatctcgaccatgaagtggtctatctcattaaggttatttaggcggtactgtctcaggtcggtcatttgcttcaattttaaggagttgttgttcaatgcacataaagacttcgaaggcggttgactccagctcttttccacgaggattcctgtaggtagatagtatggaaaggatagctgagagttcttgtggagtgatgtcatagaggccataaactccacgagaatctttatctaaatacatgctcatagcttagtcattttttgttgctcctcgatgctccggagtggaagatcatattttcgttgtcgtttggaagagtaccgggagaagcattggccggcatcgttccaacgaagtgttttccactttagaattgtttttctttccccggaaatggtaactttcttagggattggaacctgaccatataccttgcggactgatgaagagtttttagcatagaatatatggtctaatttataagagcaagcgttcatggcaagctcaaaggtagtggtattgtacattgacatattcgttatttaattttaagttcaaccttctttggtttttcatcttcccatttgacttcaggaaaaagtctatcatttattaaaaaagatcttcctttattatcccttaactcccattctccggaaaattggtctttttgggggttacttgtatatagatataagcgtccatctttatctcttgctatgtaatacatgacttgtacctttctttattatttttatttagaaaaccctttgatcacatgtctgggagtggaatcattaacttttcgttttttcttttcggtaaaatcatacttgtaccgccaatagacacataaaatatcttttgtgccaatcgtaatgatatatacgattacggttaaccaaaaccagctaactgtactcattattcccaaaatcctatctgtatcaattcgtcgccattcttaacagctataatgcctttgccttccctcgtctttttgaaactataatcatcatccaataaccgaaggaacacttttccgtaatcagaaaattgagaatcttgctcgtcattgagagcgacggctttcaccgttaccccatttttatccatatatttaaaaattacacctttgctcatatttgtatagatttgaattattctatattgctaattttggctcagaaagaacctcatttaatctctttattcctgcatcgtagtattctttgtctatttcgaagccgatatatttccggttggtattgacacaggcaatcgctgtggaacaactgccgataaatgggtctaaaacaacatcgtctgactgtgtggttaatgccaacaatctttcaataagacgaacaggcttctgtgtcgggtgaattgcgctgtaatggtcacgaactatcttaataattgatttctcattcattccacattccattgatgatataatgttacacgacctgtctccgattttcatgtctccgtgcagtccttgcttgtttgctttttcatctttatacaaatctgttcttattattgacctttctgtacatccatcactcatggctctgactaccgcagcgcatctatcctcatttttaaaacccggctgagccgatacgttatatccactaaccctatcaagatcataagatgcaacattgttaattaaaaaatcttcaactgccttcaacgatttaggattatgtaatatagctttcattcttcttagatcctgtaatactgaggccacatcaccacattttgcttctatgtatggaaccttaaccctattaatgctacccttacccaaactgctaatacttatagtttcgtgcactcttaataaagccaataaaggagatgttatatatgatttatcccaaatgacttcctctttaaaggagaaacccaattgagaaagtatgacattccacctataaaacgaagtaccacgcccaaatagtactacaaatccatcaggttgaagcacccgtttaaattctttaaacagctcacgttcatcaaattcacgttccagtttctgccctttcaagtatagatatggaggatcggtaatgatacaatctacacttgcatcaggaatacgtttaattccttcctgacaatcctcattgtatattctattaatatccatatttagttcatttctttattgttattagttaatcaaaaccgtaaaattgaccatacttattgaagccgggaacttcttttattgtaggatgtttttctacatgttgtgctttctctcgcaaatcggtagaatgttcgttagcttctacaaccgttttaacccctgtttcgacaaatcttccatcctcacactctttacaatgtggactattgcaattacatttagttttgttcatataggtattgtattgaatgttattcgattgaatataatgcctgcatacattcgaaggggaaagatgaatttaatgcgtcgtatacttcttctggtataccgtcttcactttcaaaattaccttcgatactttcagaaccaaatgctgttgcaacatgcttctctttatactctttaccgtcaatgattacggtactctcccagccatcaggagtaatttcgatttttatcttattcatgttatctcttgatttttttaatgaatcacaatagttttctaattcggatatcacaaagttgaatgcatctttgtaaccatttgaataagctctcttttggttgtgcattccaaataagaaagcaaggctacctatggaaaggtaaagcaatgctaatagaacttttcgtttcattcgtttctttttttatattgaagattattgtatagcttcgtcaagataactaattgtatctccgactgaacaaaaagcatgatcgaggctatcaattgcatctgacattctttcacctttctcgcattcttgtagtgactcagggagattgtcgtatgcttcttgctcttcatcctgaattttttcaatttcggtttctaaatcagtcaactgatctataatattctgaatccttttacgcctgtctttattcatatttgtttattaattaattagagttatagacatagcgacataatcctcttctaaagccagaaaatcacttaaaacataatctacccgtacgtagcagtagcgtccagtgtacttctctgttatggggtctaattctttggcaggatcgtattcacgcaagcgaagaacatcaccaacggagaaacatctatcatttttccgtatttcaaatcttttctttccgtctattatcgcttgataataaggcggccatgtttttaattcatgattcatatttaaattgttatgcacttattctgattctattttggggcttatcaatacaatttccgacgcctttgattgaactgtaatcacctttaattacctttatcattgattctaatatgtatcggtaaacattgatgtagttagaataaccaaaagaaatccagtcgttgacaaaagatatctttattacattggtatttttaatgcccccttcgtaccagaaataatcaccagatagagttttatgtgcttgaaggtatattaaatacatttctccattatactctacggagcatctccataagtagtaatcatagtactgattacattcaaatgagtggcttataatgttcgctttcataaatcttcttcaataaaagtgttggttgtatttataactcctgctgaatcaatagtttgaccatcacgaataaatattttatcaaaaatcaaggccttatagttggattccgtcatatagaatacacatacacgaccatcagcatacaatttgcatttcatgaattcagtcccttctaccggacctattacatctatttgcattgttctttttcccatatttaaatagtttattgcgttagtaaatcatcgtgcggagccgggaatcgaacccggataaccttacaccgcttttatttaagatggtggacatgccaataagttatcatttccggtatgtcatgcagtcccaggcgagcttttatattttctcgatgccgaataatggtaaacttggaaagggaaagtttcgccgctatgtcttcagttcgaatgtttgcaacaattagtcgatacacctccatctctctatttgtcagactggtatcaatttcaggtttacaaacaactccttctaattgacactcgccacgaagagggcatttcacctcctcaaaaatgaaatgcccattggaatcaatatcatgactaaattgatcgtattcgccaaaattacagcgacaaaaacgatgaacgacagagtattcaaagaatgttttattcattgtacgctttgaatatagttccatcaatgctgcataagctttgggataacgatcactgattattgtaagcataggggatatgagctcgcgatcttcttcttttaagcgacgtgcaggttggttgacttctttaattataacatccccatctggagtgttataaaattcaatattggctaacatggcattacttgttttatatcttcaattattctatctatcaatctttcctctaatggtttgaaagtattatgccgaagtttataatagaaagttgtataagacattccactttctgcaagaatacggtttcgcattgtttccttactatcatctggtaaactatcatagtagtctttaaataccatttttgcaattttctgttctttttccatgattagtacaatttttagtgctatatttatactgcaaacataaataataatattcacacagcaaagaattatttgctataataatattattgtttattatttagacaaaatataaataatagtttatgattaggccagataaattagctcaattgattgaagaaagaagaattgtaaagaccaaactttgtgaggagcttgagatatccgttatgacactgaacaatttcttaaataagggctctgaaattggttctaataaacttgaaaaaatagcagataagtttcaggtacctatcgactatttttatgatcgtgaagtcgaaatagatgaacgatggcatattgggcataatgtgaatggtaatggcaataaggtgtctggagatatcactttaagtgaatgtcagaaggaaatacaacatcttacgcaattacttcacgaaaaacaggctattatcgacgaaaaggaaagaacaattcaaattctattaaataataaataggacatggaaaatggaataagttttgagacgcctcaagattcatttattgaggttacaggagagctttatgaaatgaattctatcctgaatcgcgaagctactcttattattaatatatctcatatcgtagcggtgcgtaaagatgaagataaagcatgtttctatttaattaatggtttaagaatcagaacacaaaggcagtactatgaggttgagcaaactctgatagggaaatgtaacttcattggtgcagtgtgataattgagtagacaataatagacaataaatgacaaatagacatttatacatattgctaaaagactaataatcagtgctgggttagtggggagccttctcccgctaccccgactaaagtctaaaagactgaaaactaattaattaagatgacgtagagctgatgcaatttgcatcggctctacgtcatttatagcaaaaattgtgttatttgacattctttctatgctaataaaggagatttttttataactatcttataactgattttaaactcaagtaatgagaaggtccttgaaaaaacataagttcatcgaagaaatggtaattaattatataactaaaatctaatattatgaaatgctattgtagtcaacactcccctaaagaggataataaatgttcgaaaacgttgagtttctcggattataattcaaacattatgtttaaagacaatcgaattagtcataaaatgcaaaaggccaatataaatagtatctgccaaagaactactgctatagatcctctttgcacccaatttaaagaaaatcatatcatagaaaagagcaagacccctaatatatgggagtttacagcttgtgcaatagataaaggagctccaaacactttgaattatattccaaataaagaatcggtagtttatgtaaggaatatgataaatgaagaaatagttactaaagtacaagccgataaagaaaaaataccatactcgccaataagcattcatgaagtaaatcgtgtaaaggtgctttctagagatgataatcaattatttaaagatgtaaagtatgcgccggggctttccagagatgaatatccgtatgcatctacaattgaaggtggaagtgatggatactgggcgtatgtccctgtgcatgaacaatcagttcaaggtggtaaactacaaggattatataagaggctactaagcagtggatcctcagagtttgatgttgttctagcataaaactcttcaatatagaaaggacagatagaatcaactaattaagaagcaatgaaaggtgagcgacaacatacagactttaatgaatatgatgacacccgggtaacatgtccgagatgtggttctactcagatacacgctgaaaagattgcttatggtcaatttctcagtaataagatattgattagctgtttaaaatgcggtcatcaattcagattaaagaaacagccgatacctgatagattaagcctgcatcctcttgaaaggactaaaggtctttatgtgacgtgtcccaattgtggaaagctttctggtacggcgtgttatgcatgtccaaaatgtggccgtaagtttttgcaagaagactttgacaaggcaagaaagataaaaggaacaggttgttttactgtcatagtgattggggggctggttgtttccttgttatttatgtaatataaaatataatcgcatggaagaaaacgctcttttatcacatgaattagagaggttaaaacagcctgtcagaagtgctaaaaaagagtcgttattataactatcttataaaaagaataagctgctgattttctagtagcttatttttgtatatagagacatccaacaaaataactgcctataactgatttttgagataaaggtatgatagcatcaaattacatttttaaataaaaatcttttgtcagtgcaatatattccggtgtaaattgatggtgttctacttcaatacataaagtctcttctatgcactcatgttcttcgtggctgaatgaaataagtactcttcggcttggtttatccggtttggtgaagacatgaagacaacgcgaagggtacaacttgtatttccaggctgtgtcaattactaacttttctgcttcggtaggaatgataacacataccctcccctgcttttcaaggagatgtgccgagcgtcgaaaaagtaactcataatttagttcacaggtatgacgtgccatattgcgttgcttgtcagggcagttcaatgcattaacaaaatatggtggattagaaactatcagattatatttactttcagtccgaaatagactgaaatcgttacagataacttgtattcgttttgtccacggagaacgggctatattcatcttagcctgagctgccgcagcttcatctatttctatagccgtgatttgcgacaatgaatatcgctgtgctaacattatcgctatcagtccagtgccagttcctatatcgaggattttttgcgagctttctgcctctgcccaggcgcctagcagcactccgtctgtacctactttcatggcacatttatcgtgccatatagtaaattgtttaaactgaaaataaggatttgacatagattgtagttgttaatagagagcaaaaatagacaaagtcgggaatattacgacaaatttggcaccgtttttgtctttttatagaaaaggtgctttatattaatgaagaatagattaactttgcaggcgctttataagccctgtcagtatgacataaacttaaaaagaacgaaatgaagaaaagactttacctaaaagatacggaagcaagagaagaaggaaacactttttctgtgattgctgattttgaggggaatgaagaacagttgatggatattgaagtgaatgagatacttccgatattacctttacggaatatggttttatttccaggtgtatttatgccggtatctgtcgggagaaagacttccatgaaattagtgcgtgaagctgaaaaaaaaggtgcatatatcggagtggtttgccagaaggtagcagaaacggagatgccttcgttggaagatttgcatactattggtacggtaggtaagattatccgtatcttggaaatgcctgatcagactaccactattattctgcaaggcgtcaaacgtatggaattggaagaaattgtagatacaactccttatttgaaagggcgcgtaaaagcattgggagaagatattcctgacaaaaatgataaggagttccatgcattggtggaagcttgcaaggatctgactataagatatatcaaatcatctgatatgtttccgcaggattctgcatttgccatcaagaatattacgaatcctatgttcctggtggattttatctgcacgaaccttccgctgaaaaaagatgagaagattgaattgctgcgtattgatgcattgcgtgcacgtacttatcgtttgttggagatactgaatcgggaagtgcaacttgccgaaatcaaggagtccatacagatgcgtgcacgggaggatattgaccagcaacaacgtgaatatttcctgcaacagcagattaagaccattcaagatgaattgggtggtggtggccaggaacaggaaatagaagaattacgccgtaaagcaatcgctactaagtggagtgcggaagtaagagacactttcatgaaagaggtggataaactggaacgtacacatccacaatctcctgattatagtgtgcaactcaattatctgcaaacaatgctaagtttgccgtggggaatatacactacagataatctgaacttagtcaatgctgagaagactctgaataaagatcattatggcttggagaaggtgaaagaacgtattctggagcacttggctgtattgaagctgaaaggtgatatgaagtcgcctattatctgtttgtatggccctccgggagtaggtaaaacctctttgggacgttctatcgctgctgccctcaaacggaaatatatccgtatgtcattgggtggcgtgcatgatgaagcagagatacgtggacatcgtaagacgtacatcggtgctatgccgggacgtattatcaaaagtctgatcaaggctggctcatccaatccggtgtttatcctggatgaaatagataaggtgagttcagatcgtcagggagatccttcttcagctttgcttgaggtgcttgatccggaacagaatacaacattccatgataatttcctggatgtagattacgatttatctaaagtaatgttcattgctactgcaaataatctgaatactatccctggaccgttgctcgatcgtatggagttgattgaggtaagtggttatatcactgaagagaagattgaaatagcccgtcgccatctggttccgaaagaactggaagccaacggtatgaagaagaatgatatcaaaataccaaagaatacgctggaggctattatcgagtcgtatacccgtgaaagtggtgtacgcgaattagagaagaagataggtaaaatacttcgtaaatcggcacgccagtatgctacggatggctactttgccaaacaggaaatcaaaccgggagatttgtatgagttcctcggagcacctgagtatacccgtgataaatatcagggcaatgaatacgctggtgtagtgaccgggttagcatggaccgccgtggggggagaaatcctgtttgtagaaactagtttgagccgcggaaaaggtgggcgtctgacgttgaccggaaatctgggtgatgtcatgaaagagtctgcaatgctggccttggaatatatcaaggcacacgcttctttgctgaatctggatgaagatatttttgataattggaatatccacgtacatgtgccggaaggtgctattcctaaggacggcccctcggcaggtatcaccatggccacttctctcgcctctgccctcacccagcgtaaagtgaaggcaaatcttgccatgacaggagaaataacacttcgtggcaaggtacttcccgtgggtggtattaaggagaagattctggcagcgaaacgtgccggcatcaagaatattattctaagtgaagagaaccgtaagaatattgacgagatacaggaaatatacctcaaagggttgactttccattacgtgaaagatgtgaaagaggtgtttgccattgcgctgaccaatgagaaggttgccgatgccatcgacttgtccgtaaagaaagaaaagaaagcagaatgacattcgacttacaatatacagacagtaaaagtaatgcgcgtgcaggattgataactaccgatcacgggcagatagaaactcctatctttatgccggtaggtaccgtaggaacggtgaaaggtgtgcatgtaaccgaactgaaagaagatattaaggcgcaaatcatattagggaatacctatcatctatatctgcgtccgggattggacgtattggaaaaagccggaggactgcataagttcaacggctttgaccgtcctatgctgacagatagtggcggatttcaggtgttctcattatcaggtatccgtaaactacgtgaggagggtgcggaattccgttcacatatcgacggtagtaaacatatcttcactccagaaaaggtaatggatattgagcgtacgattggtgcagatatcatgatggcgtttgacgaatgccctccaggagattcggattatgcgtatgccaaaaagtcattaggactcacacatcgttggttggaccgttgcattcagcgtttcaatgaaacggaaccgaagtatggataccagcagtctctctttcctattgttcaaggatgtgtatatcctgatcttcgcaagcagtcggcagaattcatagcgtcgaagggtgcggatggtaatgccatcggtggtctggcagtaggtgaacctgtggataaaatgtatgagatgattgagttggtgaatgacattttaccgaaagataagccacggtatctgatgggtgtaggtacaccggtcaatattttggaaggtatcgagcgcggtgtagacatgttcgattgtgtaatgccaacccgaaacggacgcaatggcatgttgttcaccaaagatggtatcatcaatatgcgtaataagaaatgggaaacagacttctcgcccattgaagcagatggagcttctgcggtagataccttatatagtaaggcatatctgcggcatctgttccatgcacaggagttactggctatgcaaattgcatctattcataatttggcattttatctgtggctggtgggtgaagctcgcaagcacatcattgccggtgatttctccacatggaaaccgatgatggtgaaacgcgtatcgacaaggttatgaaaaaactgaactggaacatgaaaggtataaagatgccggataactggaaatggttgaagcggctcgacttctacattattaagaagttccttggaacttatgtgtttgccattgcattgattatctccattgcagtggtattcgactttaatgagaagatggacagatttatgtcacacgaagctccttggaaagccataatcttcgattattatctgaatttcattccttactttgcaaacctgttcagtccgttgtttgtgtttattgcggttattttctttacctcaaaactggctgagaactccgagattattgcgatgttctctactggaatgagttttaagaggatgcttcgtccctacatggtgtcagcagctataattgcaatagtaacattctttttgggttcttatatcataccccaaggtagtgtgacgcgtattaactttgaagataaatattataagcagcgcaaatcgaatacagctcgtaacattcagttggaagtagattcgggcgtcattgcttatattgaacgcttcgaagattatagcaagacgggatatcgtttttcattggataagtttaaagacaaacagttggtttctcatcttacggcacgatctatcacttatgatacagcctccgtccataaatggattataaaggattacatgatacgtgagatggatggtatgaaagagaacattgttaagggagaccgcatcgatagtactctttttatggaacctgccgattttcttattatgaaaaatcaacaggaaatgatgaccagtccacaattaagcgaatatattagccggcagcggcagcgtggctttgccaatatcaaagagttcgaaattgaatatcacaaacgcattgccatgtcgtttgcatcatttatcctcacattgataggtgtttctctttcttcgaaaaagactaaagggggaatgggattacacttggggataggtttggcattgagcttttcatatattttgttccagacgattgcttccacttttgcagtgaatggtaatgtccctccggtaattgctgtatggataccgaatatactctatgcgtttattgcattttatctgtatcagaaggcaccgaaatagagtagccaactcaacttaacaaaaataagaagcccctcccgctccttgtgttaccacaagtgcaggaggggcttttttgttgtatccatttcctcttttgtctttgcttcttttgactctaacgatgcttttttcatcacataagttttagaagcaaccccactttcgtcttacaggttctttaaatctttcatggcaatgtgcagtgaaagcttaattcaagtaagctgaaagttctgcagcagagatgtttttggctataattacaccattatcatccagtaaatagttagtaaatccccggcctaaacggtactttttaaagatgccggacgactcgcctttagtttccacgaaacaggtgggcgtaactatttggtccttacgaatggtttcctcgaagatagattgatattcatcaaatgatacggaaaccatttccacattattgtttggagaagttgagtgaagcgcattgctcaaacttgcgttttgcatccgggattgcgcatcataacttgcccagaaactgagtaacacatattttcccttcatcttggagagattttgaataggttgttgctcagtcgacatagttttgattttaaaatcaggggctatgtcacccacatttaaacctccggtaggtttgtctttttctacgaaagaagtcaaggaactaattagtaatacaacaaaaatccattttacatgcttcatgtaaggcggttttggttaatactggttgatttatagatgtttgtcagacggtaaaaacaacgtcttagctaacaaatatacaatcaacgtttactaagattatagaaccactcgttctaaatcggcgacaaaggtataactttattattgaaaatcaagtaaacggttgactttttcatgttatataacatgttttgcatctctggatacctctctgcacagtattgatccggtgattttcgaatatatattatgtgtttttatcatttgtatcaagtatgtcctcaagagaaataggaaacatttcatggatattactgttaaatacatatttctatgttaattggtgtatatagcaggaattttatctacttttgcaccgtgttactcattaatttagataaacaattttatatgcaaccgttgagcacagaacttattcttattcgcgttacgggcgaagatcgtccgggattaactgcatccgttacagaaattttagctaaatacgacgctactattcttgacattggtcaggcggacattcataatacactgtcattgggtatcttatgcaagacagaggaacaacattcaggattcattatgaaagagttgcttttcaaggcatcttctttgggagtgacgattcgcttctatcctatttcggtgaaagaatatgaagattgggtcaatatgcagggaaaaaatcgctatatccttactttactgggacgtaagttgtctgcccgccagatctccgcagtcacccgcattcttgccgaacaggggatgaatattgatgctatcaagcgcctgacggggcgtatcccattggatgaatgtgatttacgtactcgtgcgtgtatcgaattctccgtccgtggaactccgaaggatcgcattgccatgcaagagcaactgatgaagctggcgagcgaacttgaaatggacttctcttttcaactcgataatatgtatcgtcgtatgcgccgtctgatatgtttcgatatggactccacactgattgagacggaagtaattgacgaattggccatacgtgccggtgtaggagatgaagtaaaagccatcaccgaacgggccatgcgtggggaaatagattttaccgaaagcttccgcgaacgcgtagccttactgaaagggttggatgaatctgtaatgcaggatatagcggaacacctgcctataacagaaggagtagaccgattgatgtatgtgttgaaaaagtacggctataagattgccattctttccggtggtttcacctatttcggacaatacttgcaacaaaaatatggtattgattacgtatatgccaatgaactggaaattgtggatggtaagttgactggacgttatttgggagatgttgtagacggtaagcggaaagctgaactgttgcgtctgattgcgcaggtggaaaaagtggatattgctcaaactattgccgtgggtgatggagccaatgatcttccgatgctgggtgttgccggtttgggtatcgcttttcatgctaaacccaaagtggttgccaatgccaaacagtccatcaatacaatcgggctcgatggagtgctctatttcttaggcttcaaggactcatatatcgatttgccgaaatgagctgaactattccgcaaatatatttgtttcatataatgacatctatatttgcggaacctcttaaatattaatactatgaagagaatacggaaccttttctatctctctttgtttttgactgtccctggccttcaagccgttgcacaagaaaaacttcacgttagcctccctgactctataacgactgttggatatgccacaggccttcgcaagaacctttcaggacttgtagaaagaatcaccgaaaaccagatgaataaagaccagataaccaatccactggatgcaatccgcggacgggtaccgggtttgactattctgaaaggttccaacggacctgcagcattggatgctgtccgcttgcgtggtaccacttcattgactactggcaatgatccgttgattattgtagacggagtttttggtgatttgagtatgcttatgtctatctatccggcggatattgaaagttttgttattttgaaagatgcttcggaaacagcgcaatatggttcgcgcggagcatcgggtgttattgaaattaccactaaaaaaggtgttagtgggcgtacaagtgtgaactataatggtagcttcggtattgcttcaagctataaaacggtaagaatgctcaatggagatgaattccgggcagtagctaaagaacgtggcgtttctattcttgatttgggaaacaataccgatttccagaaggaaatagaacaaacagggctgcaacataatcatcacatagccttctccggtggaacaaatacctccaactatcgcgtttcacttgctttgatgaatcgtgaaggagtaattgtcaatgaaaagttgcagaacttcacatcgaatatgaatatgacgcagtacgtgttcgataattttctgaaatgtgatctcggaatgtttggttccatacagaaagagcgtaacctggtaaatttacataaagtgttttattcggctgctgcatttaatcccactttccctaatcataagaatccggaaaccggaagttgggatggaagtgttcttgccagccagttgtctcatccgctggcatggatggatgtgaatgataaagacgctacttcgcacattagtacgcatgcacggttgacatttaatttgtctgaagcatggaaactggcactgtttggttcctacacctataatgtgattgaaaattcacagtatctgccggttgcggtctgggcgcaagggcaggcatacaaaggaactaagaaaatggaatcgttattggggaacctgatgttgtcttataagaaagaatggcggaagcatttctttgatgttttggggctggcggaagtgcaaaaagaccaatattcgggattctataccacagttactaatttcagtattgatggtttgggctataacaatcttcagggaggtgctctccgtccgtgggaaggaactaattcttattatgaagatcctcgtctggcctccttcatgggacgtgtgaactatacatacgatgatcgttatatactgacagtgaatgcccgtggagatgcctcttccaagtttggcagtaatcataaatggggtttctttccggctgtatctgttgcatgggtagtcggcaaggaaaagtttatggagaaactgcctttcattgacaatctgaaagtccgcgcaggctatggtttggcaggtaaccaaaatggaattgattcgtacacctcgctgaatctgatacgcccgaacggagttgctccggtaggttcatcacctgtggtcacaatggaccaattgaagaatatgaatccggacttaaaatgggaagtgaaacagaccttcaatgccggtatagaaatggctttgctgggtaaccggttgttactaaccgccaactattataattccaagacgaaagatatgctctatctctataatgtaagtgtaccgcctttcacttacaacactttgctggcaaacattggttccatgcgtaattatgggacagagctatccattggcataactccattgaaaaccaaagatatggaactgaatatcaatgctaacctgacttttcaacaaaacaaattgctttccctcgacggcaactatcagggtgaacatatttcagcaacagaatacaagagtcttgccggattggatggtgccggatttcatggcggatataatcatatcgtttaccagattgtaggtcaaccgctgggggtattttacctcccccattgcacaggattagtatccgatggtaacggaggctatacttatcagattgctgatttgaatggtggtggtgttagtctggaagatggtgaagaccggtacatagcaggtcaggcagttccaaaaacaattcttggctctaatatcagttttcgttataaagatttcgatgtatcgttacagataaacggtgcattcgggcataaagtctataatggtacttcgcttacttatatgaatatgaatagtttccccgactataacgttatgaagaaagcgcctacacggaatataaaggatcagacagctacagattattggttggaagatggtgattatgtgaacttcgactatatcacagtgggctggaatgttccattgaaaaatacccgttacctgcaatcgcttcgcctgtcactgacggtcaacaatctggctactatttccggttattccggattgacacccatgataaacagttcatcggtaaattctactttaggtatagatgataaacgcaattatcctttataccgcacatataccatcggattaagtgtaaacttctaaaccttaaagacatgaaaagatattccataattccttcgttttgtgttttggtcaccctcagttggtgcatgatctcatgtgatggttttctaaaagaaagtccgcgcgatgcattacccgaagaagaaggctatcgcaacatgaccgaactttatctgaacgcggttgcctctctctataactatattggaggaaattccgatagtcaaggattgcagggaacaggacgcggcatatatgatctgaatacttttacaaccgatgaagccattatgcctactcgtggtggtgactggtacgacggtggtttctggcaaggactgttcttgcacaaatggggaataaataatgatgcgatacaagccacctgggaatatctctataaagtagttatgctcagtaataagtctttggaacaaattgaaagttatgcacttacacatgcagatgcagaacttccagcctatcgtgccgaagtacgtgccttacgtgcaatgtactattattatctgacggacctgttcggtagtattccgttggttctatcttccaaggttgcctcaaaagatattgtactgagtgaacgtgagaatatctttaatttcatattcaaggaactacaagagacagccccactcctgcccgctcagttcagtaaccgttctggtaattactatggccgcttgacacgtcccgtagcctacttcctgcttgcaaaactggcactgaatgcagaaatttatatggataataactgggtggatgatacccatccgaatgggaaaacaatcttctttgatgtggatggcaatacattcaatgcctggcagaccgtagaattctattgtgaccaaattacagctttaggttatcgtcttgaatcagattatgctgccaattttgccgtatataatgaaggctctgttgaaaacatcttcactattccgatgaataagacgctatataccaatcagatgcaatatcttttccgttcgcgtcattataatcatgccaaagcgttaggtttgtctggtgagaatggatcaagtgccactatcgaagccttacagacttttggatacgagacaaacgaacaggacccgcgttttgattattgctattatgcaggtactgtttatgatttgaaaggtaatgtcgtgaaattggatgatggaacagctttagtttacgaaccgtggaaggttaaactggatctgtctgatgaaccttatgaaaagactgccggtgcccgtatgaaaaaatatgagatagatgacaaagccatgaaagatggaaaattgatggagaatgatattgttctgtttcgttacgctgatgtattgcttatgaagagtgaagccaaagtccgtgacggacgcaatggagatgaagaactgaatcaggtgcgtacccgtgtaggagcaccggaacgtactgctactttggacaatcttctggctgagcgccaattagaattggcctgggaaggttggcggcgtcaggacttaattcgttttggacagtttacccgttcttacaacagtcgtccgcaacttcccaacgaagaaagtgggtatactattgtcttccccattcccgagaaaatcagacaaatgaatccggaatgggaacagcatccggggtattaaaggaatggattgcaaagtagcttcattcttttgtgataatcactttatttcctatctttgcgactaaataaaaagaaacatgaagttttccgaactacaactgaatgatcaggtgcttgatgcactggaagccatgcgcttcgatgagtgcacacctatacaagagaaatccattcccgttatacttgaaggcagagatttaatagccgtggcacagaccggaaccggtaagacggctgcctatctgttgcctgtactgaataaactttccgaaggtggacatcctgaagatgctataaactgtattgttatgtctcccacacgagaattggcgcaacaaatagatcagcagatggaaggtttttcctacttcatgcctgtcagcagtgtggcagtttatggtggtaacgatgggatactctttgaacagcaaaagaaggggctaatgttgggagccgatgttgttatagctactccgggacgtttgatagctcatctgagtttgggatatgtagatctctcccgtgtttcctatttcattcttgacgaagccgaccgcatgctcgatatgggtttcttcgatgacatcatgcagattgtgaagtatttgcctaaagaacggcaaaccatcatgttctctgctaccatgcctgcaaaaatacaacaacttgccaacaccattctcaataatcccgctgaagtcaaacttgcagtttcacgccctgctgataaaattgtgcaagccgcctatgtttgctatgaaaatcagaagttgggtataattcgcagtctctttgctgaacaaacaccggagcgtgtcattatcttcgcatcatccaagttgaaagtaaaggaagtgacaaaggccttgaaaatgatgaagctgaatgtaggcgaaatgcattctgacctggaacaggcacagcgtgaagaagtgatgcatgagtttaaggcaggtcgtataaacattctggttgccactgacatcgtggctcgtggtattgacattgatgatattcgtcttgtgattaactatgatgttccgcatgacagtgaagactatgttcatcgtattggtcgtacggcgcgtgctaataacgatggtgttgctctaacctttgtaaatgaaaaggaacaaagtaacttcaagcaaattgagaatttcctggaaagagatatttataaaatacctgtacctgaagaattaggtgagtcacccgaatacaagccacgtagttatgacggaaggggcaaacgtaacttccgtgctaaaggacgaaataccaataaaggtagtggaaatgctccgaagaaaggagatgcttcaaaaggaagaggtaatgctccgagaaaaagtgctaacccttcaggaaaaagcaacaaataagagaaggatttctttaatagatattgtttgatggtggagttttactccaccatttttatatgtaattgcttatcagtaccgatagtcaggcttacgagatgataaacggaactttccggaatacggagcatggcttcatagtgatagccttttccatccacatttataaaattcatgtcggaaagaatggtctgatttaatacttcctccggaaaaatagttgcgaaaacttttttagtaatatccttgccatacagtaatttcttgccttcatatacacagatatgtatcacgttgtcatagtatacattgtccacacctataccttcatcagaatatactgtttttattactttcatcttagaagggttgatatagacatagccccgataacgcgttcctttatacataaccacactatcttttttgattacttctgaagtgctggggataacttccacttcctgagtggagaatgccagagtgtcttccggattatcggacttatatagctttacgatatcatcagatagagaatgaaaccaaaagctatattccgtttgacggtctattttataagctgtaagggtatttccgcgtaaataaatcgtatcacgaagtaccttgaagtaaacaggtgcattttgtgggtcagcataatagatcgtatcaccactaatacgcattaacggcatatccgtctcatcgtccagccagacaccttgcagcaattctttagcggttaagtcttccctgtcggaattttccccatttttagtactgctacaggatgatacaagcacaacaacgagcaccatagaaatagtaccccactttatcataactctctctgttttatatttttaatgtccgatgcaatgataggtaaatccttgctcttccatttctttcttgtcatagatattacgcccgtccaacaccacaggtttctccatggttttcttgataactgcccaggatggtaaacggaattctttccattcggtaaccagcattaaagcatcagcatcaagtacagcatcatacatatctttggcataataaatgctctcacctatccgacggcgacattcgtccattgcagcggagtcgtaagcccgcactttgcatccggctttcagcagtttgtctattaacaccaatgaaggggcttcgcgcatatcatccgtctccggtttgaaagccagtccccataaggcaattgtcttacctttcagttcgttgttgaagtgcttgcaaagtttgtcgaaaagaatgcttttctgtagttcattgacttcttctacagcatggagcacacgcatctgatagccattttgttcagcggttttgatgagtgcttttacatcttttggaaagcacgaaccaccataaccaatacccggataaaggaacttacgtccgattcgggtatccgaaccgatgccactacgtaccatattgacatctgcccctaccagttcgcaaagattagcgatatcattcataaaactaatacgggtagccagcattgagttagccgcatacttcgtcatttcagcagacgggatatccataaatattacacggaaattgttcagcaagaatggtttataaagcttactcatcaatttctttgcacgttcggactccactcccactactacacggtccgggctcataaaatcattgatagcatttccttctttcaggaattcgggattagaggctacatcaaattgaatactaacaccccgtttatccagttcctcctggatagcggcacgtactttctttgcagtacctacaggaaccgtactctttgtgactaccaatatgtacttcttcatgtttctaccaatggtacgggcaacttcgagcacataactgagatcagcacttccatcttcgtcaggaggcgtaccaacggcactgaaaacaacgtctacttcattcaggcagctctccaatgaagttgtgaaatgtaggcgaccggcttttacatttcggttcaccatttcttccagaccactttcatagataggaataacacctttcttgagcgcttcaattttttcactgttcgtgtctacgcaaatgacgctgacaccgatttctgcaaaacaggttccggtcactaaaccgacatatcctgtaccgacgatggctatcttcatactctttattcaaaatatgtcgcatcccggaaggatggagctgttttatctttaggagataataaaagttgttcttctgctataggccactcaattcctatggtttcatcattgaaacgaatggatgcttctgcttgtggaacataagcattatctactttataaataaagatagcttcctcactcagaacaaggaaaccatgtgcgaatccacggggaatgaaaaattgccgttgattttcctcactcagttctgcagagacatatttaccgaaagttggtgatgattggcgcaaatccactgccacatccagtacttttccttttataacacgtaccagtttggactgacaatattctcctttctgataatgtaatccacgtaatacaccgaaggaagacttcgactcattgtcctgaataaagtgcacatcaccgatatgcattttgaattcctcttctttaaaggcttccataaaatagccacgctcgtcacgaagaactttcggttcgatcagccatacaccatcaatttccgtttgtatgtaattcatctttttcagaatgttttttgtactttcaactggcaacctaaattgtcaccatatatctctcctatatcgaaagcaatggatgcattgaaccgccatcctttccatttatggggagtatagaaaactgatgcaaaagtagaaaaattttctaatatattaggtataggtttgaaaggagttccccaagttttattatatgatagttttgcgaggtatgtccattcattactgatgtctccactccaacctaaatgcaaggctcggatacggttgtatttgaaactcatgtcaccgtctttgttataaatgggagaagctatcaatgggttagccatagtcatcccccagtgtacccagccgggataccactcgttgttataataatcgtcggcacctcccgttttctctactacggtgaaatccactccatgcattggaccgctctgattagtagtctgatagtattccagtacaaaaccgttgatggcctgtttgtggttagatttgtattcgatcccccataaaccatcaaatccgttgagttttcccattccactgaaatcatcgtaataattctccagataagcgctgatggaaaaatcttcatgacgataagtcatccgtatatgttcgctacccataaaattaccttgataggcaatttgttctccttcaggactactgtcatctccacgactgggaataaataccttgaaataatctttccaactatttcccaaatctcctgcatccattccggcgcttttatatccaccaaactgtacatccaagctcatacccaggtctagttgccacttaccctgtggaactccaatgcgtaggaatccgcttttatggtgatatttgatgcttttagtataccaataatcctctcctacctgctttctctgatatttattatcagtaaaccatccgtacgacatttctgcttttaaagcgaggcatggtaatacttgcacatattcaggaagtcctatccatacttgtggaataggtcttgcattacccgaccaggttagtccgccactacttaattgctgatttaataaaggtgagtcaatctctttactaccaatgagtatccccaaccatttatatcgtatgtcagcataagcctgttgcaatataaaagtggatgtaaaaccggatgcaaccgccatatccagtcctccttccaacctccactggcggattgtatctgtataaaaagctccacctcttaaataagtattattgtcaatagaggataatccatgttgattgctgacctgccacaaaggagtgttgtcaccggtatggacagatgctccatattcaacgaaagatgaaatgttctgatgcttcagtccgctttgcgctgtcattactgacgaagcagaaaagcaaaacaggattgtaagtatgtgacaggttatacgcatgagcttatcggaatataatttttattgtgttgaacatgattttcaggtctaatgaaaacgaccaatgttcgatataccatatatcatattctactctttttttcattttatccaacttctctgtttcaccgcgcaggttgtgtatctgagcccatcccgtgatacccggcttcacaataagtcttttattgtattcaggaatgatatcacaatattgctcagtatgtatcagcatatgaggacgtggccccactacggacatgtctcctttaagcacattccagaattgtggtaactcatcaagactggtgacacgcaggaaatgtcctaatggagtaatacgtggatcctcattgtaggcttgttgcgtatcggcttcaacattgggcagcatggagcgaaacttataacatgtaaataccttcccatataagccgttgcgcttttgagtaaatataatcttacccggcatctttattttgatgcaacacccgatgatgatatatgccactggatatatcgtagtcaagactatcaatgataacactatgtcaagtgttcgtttgagtatacggttacttttccgtttcaacggaaaagtatatattgaagattgtatattcattcttaaaatacagaattctttagtatatagaacgttaaattgttatctatattgttttataatattagagaattatatatttctttggtctgtccggctatattggtccagttatatgcagacaagttgtaagaaactcgttctgtctgagcattttccaattgtttcttcagagcctgttgcaaacaggataaatctccacttttgaagtaacattcctccggtaatcctatttccttattagcaggaatatcacttgccagtaccggacaattataactcatagcttcaagtagtgcgataggcaatccttcatgcgtggaaggtaatacaaatatccgtgcgtatgtatataattgtgcaagtttttctcctttgataaagcctaccaggcgtatgttcttctgctctttacacatttcttttaacttctgagtatattcatcttgataatcagcatccccggctattactaattttatagatactggagatagttgtttgaaggcttcaattagtttatcaaagcctttctctttcacaagacgccctactgctaaaatataaccatattctgtcaaatccagactttgaagatgttcagtgctacgtgcaggaaatactggatttattccattgtagatcagtgttatatttttcttatctggatatttctgttgaatcattcgtctgatatgttcagaaataactatgatatgattagcatagtacattcctgttttttctcccatacgaagtatccatttggcaaacttcccccatttatcacgatcataatctggaccatgatgggtgattaccgctttcatacctaataatcgtactaaaggggtcattaatgccggacctactgcgtgaatatgtacaatattcgcttttactttgcgtgcatataacacggctaaaaaagtatgtatgaaagcttccaaatgcttgttacgcagcactcttatatcttttataataacttgtttatatacttttacagaatgatccactgcataatagggacggcgaacaacaataatttcatgctgtttatctgcaattaatggatagagctcttcgcaatgcgtttctacccctccctgtataccgggaatgcctctggtccctgttactacaattttcatatttctttatcttaaagacaaatatatctaaattttaaatgctttgaacaacttccaaccattttcgataatatagttcggcagaaaagcgttcacatgaggttaaagatagtttttgtctatctacctccgaagaagaaataaacatatccgaaagagatgttataagctctacttcattagaaaacaggcgattatcagcatctttttctaataattcaggaataccaccaatacgcctaccgcatacaggagtaccacaacataatgattcgatagcgctgagtggattattttcatagcaaatagaaggaatcactgaaaactgaactttcttaaataatttgataattttttcagcagataaatgccctacgaactttatattatcagaggagtatttctgttttagtatatcttccaaagggcctctgcctgctatgtataatttataaggtaattgctccgctacttttagcaattcttctatacctttttctttagaaaggcggcctaaatagacataggcaagttccctttcttctgaagataattcagatataagttttactttaccgctatcaataaaattataaatgacatgaagtttattagccgggtagcctccctgcatcattttctgtgccataaagttactaggacagataaaagcatctgtccatcttgataatctacctttattccaatacattatttctccccatgccagaaggctggccaataaactatttttcatgcatttacgtgaaatgacactatatttattctctatgcaagcctcacaaggttttccttggcaaaggaaggaatatgtagggcagattaatttataatcatggacagtccatatcacttttatacctcttttatgtgctaattctgcaactataggtgagagataagaatgtatattgttaagatgaatgacatccggttgaaaatcgtctaagattttctcgtaattccgctttactcctacaccaaaaactcgtagagcagcttttagctttgcatttagcgatgactgaaagaaagaaacttctttgacgaaatattcgttctcatttacattaatattctcgggatagctcatcgaaaagaaacgaacttcatggttatgcatttttagcatttctcctaggctaattgcataagtttcagcgcctcctcgtgcatataagaatttgctaactatgagtatttttaatctgttcattattggaataaattgtttcaagttctttcattaattgcaccgaactatacgagttagtataataattctgctggtttgtttgcattctttttctatcgaatgttttatctataataatatttaagcaattacaaagactatctatatcatgaggcatacataataatcctgtattttcagcaataatattttctttaaaaaaatcgactgttgtagcaatcagaggagtttggaaataataagctaaggataatactcctgattgtgtagccgatatatatggatagactacacatgaggcatttctgtacagataagacacttctgcgtctgtgataaaacggtttattttgattatttgattattatcctttttcatacaatcaaactcccattttccgcttcctgcaatcactaattttttatcccgatgagccagactactccaatatgcatgacataaatactctattcctttatatacatggaatgtgccgaaaaacaggatataatctgtaacatcttctaattcaggaggagctttctctgttttcttcatagcgtcggttacaagacttggaaaatgatgaaaatatatattcttcttcggataccaattttgaagagtctgatgttgaaacttactatttgtaacaaggttaaaaacctttttctgaattgccgaacattgccgttggatgtaacgattagttagcttctcataaaaagataatcgaagttcgtgcgggtatacgtcatgtacggtatatatgatatgtgctgattgtctttttatacggtcaataaaatgagccaaaacataatcaacagtcaagaggtgtatgtagttcaaccgatatgtcgaacataacttttctatatgatttatcaaacataaaggagcgaccttatataggagacgggataacttatgctgcggaattgtataagtgaattgagaacagttttccggtaacaattctccatagcaatctttgccatcaattacatatagtacataaacttcgtataaagaggattgtacaatcgtttttataatttgtgtagcatacggcaccatccccggagattgttccgtgcatatatatagtattttatttttttccatggtcaattattgagtaaactttttgctttattttatcaggtaaatatttccatgatattcctaatactccaatttggaataatatcagccatatccattcgtcaacgtagtaatatataatgctggtaacgaatagcaatgataatgcaatgaaagaaggaaatttccaaactatacgaaaaaattgtctggtatcgaatatacgatacacaaaaagaaatgcatatgatatgatagatgctataattactccttgtaaccccaagtattgaataaagattagattcaagctaagattaataacagtagcaagcaatatagatggcatcattttcttggtttgtttagaacactgatagcctaaatcaagaaatgaggataatgcaaagaaaaacacagttaggaaacaaggatatatgtaatagaaactatcttgatagctggcatcaacaatccaaggcaatacaatttttagtccaatggcacaagtgaccagtaagactcctaaataaaatgtatataggttgaatattctgctgaaaaacacatctctgtcaggtgtctgatattgccgaatggccgtatcctgccaagcttgataaataatagtagaaaaagttccaagaataagtgatagcttattagctactgcgtatattccgttagcttcgctacctaaataatgcataatgataagtctatctgctgttgataatacccaccagcagacgacattaggaagtaaaggcaaagaataatgcaataaagcatgacgaacttcgcgtttctttaagccttttattatgaattttctaaagataggaacttgccactctatccatcctagaactagtatacgcgagatgatattggaaatgaaaatgccttctactcctaattttccccatacaacaaataagacacttaatactcctgtgagaaatgtacttaatataccagcaaaaacataatacctatttttattgataccccgtagaatctgcgtatgaacttcatatattgagaataccagtagcattccataagcttctaaagcatacttaaatggatagaaaaatagtaagcatatatatatgatagtcgccacaagaatatttttccctataatacggtaggtataagtaattaccgttttccaatactctgtgtgttcttcttccagcagcaatcgaaaagaaccatctcgaaaatcaaaagtcagaattggcattatcaagaatatcagcccaagatatacatcgtagacgccgaaatcttctggagatacatagtaggtatagagcggaaccatcagaaaagcaataaattttgctccaatgtttcctataccatatatcattatgttgactaaaaagtccctttctctactttgtttaggcataaatctttgtatttggccacagtcatggcagtgattattaaaatgaaaaggcctctgttttgagaaaaggtagcatctgcaacaccttctattgcaaagaatatggcggacaaaagtataagtaaatattctttcttatatccgtaattgcctaattttatccctttaaagacaacccatatccagaaatacacataaagtcctacgcctattattccaaactgtgccaataccggataataagcatcagctacatatgccggattagatttggagattccccataaatggctaataccgtatgcttcatagatggatgaataatattctccagaaacaaaagatgcaaaactagctaaaccgcacccaaatggtatataatcaataaagattcgtaaagaggttaataacattgcaggacgactccacatctcacgggaattcatcataccgtctacataataaagaattattttatctttgcccaaccaaacagcaattgctaggacgcagatagctattaggcagccgctaatattaaatttaatttctattccggctttatataaaagtataagaaaaatagcaataccacagaaaccatagaatttagctctggtagagaagaaacctatacacagaattaaaataaagactagcatatcttcccagttatccgaacaacagtaaagatataaaaaagcggtggcaataattgcttttgcaaaataggattgatgcccaaagaataagaatattccattagacaatccgatacctaacatcataaggcttgatgtcagacacataaccactatcaatcgtttttgtgaagttgtgaaagatggtgcaattagataggtacaataaaaagccagaaaaggcttaatctgaataagtaaatcttttaatatggccttgggaatattagaatggatactgaaagaataagtagtatagaataaaaaaataatcaatacgacaaataaaggaatcatttctttaatgttccttctttcattaataattaatccagagaaaaagagcaaaaacaaagccataagttcatctgccgatgtaaagtctatataatcatatagaattacatcaaaaatataccccgccactaaaaaagcgaaaaacaagttgtttttagaacagaccagccgtgaaagcatgagcatcattctttagtaaatacaaatagctttaaacaaattacgattaatgagagaaagcatgccatagcaaaagctatcgccaatactattatctttcttggataaataggttttgccgaacaataagccgcatcaataactcttccagtttgttcatcgggagaattaaccaattctttttcctgtagtttctgcatgaggaaaagatatacagtttccttgattttctgctgacgtttcatttcaatatactctcgttcttgcgtgggtaaagcattcagttgattattgaatgtatggctttttttattgattgcttccaagcttgcgcgaatactttttcgggctgcatctatagcttccattagcatctttcgttgttctgccaattgtttatctgctagaattaaagccggattgcccttttcggaagaaagtagcaaacgttggcggtcaagtactaattgattgtaaagagcaattgatttctctcctattccttcgacagctggaatggacgcatattcattttctggatttttcatatactcaaccacgtaatccagcatctttaagcgggcttccgtttctaaaatagtgctttcgagctcttggtatcccgtgatagcagccttggcgtacaatgtaggttctgggatgttattctgttttttataagtttcaattttatgttccagataggctaattctgttgttattgtatctaaacgctctctcacaaattttgcattctgattcgcttctctcactttaacattacgagaatattggttaaaaaccgccattaatgtattcagaaagtcacagccgcgctgcttattttcattatcaaaacttagcaatataatgtctgaaactgtttcttgagctccggcatatacatcctcatataaatcttcatatacttgttgcaacggagttatttggcaagttattgtttgccttcctgaaatttttacatcggtatttagagaaattagaatgtctccgattggtaatgatatacgagagggtaatacttgttctggcaattttactgttttaaacagcttcgactgtacttggattgattgtatcttattatcagataatattattttcatctttatagattcactgatagtatccagaaactgttctggaaatagaaaggtgataggattatcttttccataaagcagtacgttttttataccattacgttgatgcgtttctacctgatatccagtttgtagaattgcttcagtcatattagtacgtgatgttaatacaatgacttcatcctccacactaattcctgatgcactcccccctaacagagatccgataccactgcttttaagcattttcaattcggacatcattccttgcttatcatttattaattgcattcgtgctgtgaattcatattctttagatgtagctatcaaaaaacaaattgcagcaatcaaacaaataataccaataggtacgtatattttccaataaccaaagaattgctttagcaaagttccgatatgtatattctcatcattcataagtaggaaagatttatttaacgagcaatgcaatgcccaatgatgccaatactgataaggcactgattatagtcgaagccaaagatacattaaactgcccactttgactatatttggcattaccttttcttgctttattaggctccacatagagaacatcattctgccgtagataatagaagggtgaagtcagagtttctgcggatgtcagatcaaaacggtgatattctttttttccgttgttatcacggattagaagcacattagtacggttgccatatattgttaaatctcctgccataccaagggcatcaagtacggacaggcgttcattaggtacatttaccgttccgggtttattaacttcacccagtactgaaactttgaaattccttatctgtatcgtaacaattggagacttgacgtaagcggaaatcttttcagtcatcatgtctgtcaattcgctacgtgtcatattagcaacttgtattttaccaagtactgggaaatcaatctctccgcgtgaatttactaaataagtatgaagtacaggtgtagaggtaacatttgtttcccctggggccaaatagctggcaagtggcatattgaatgctgctacagcattcggatctgtcccggatacagttattgataattgatcatcaggagcaatccggggggtataattaacagattgctcggtaacagctggcatctggttgtctaaatcctgaaaataggtaatagtattagtcgttgttttgcacgacattaatattagtaacgaaaaagcaggaatcagcattcttattttcatcgtatatcttatcttttatcttttattaatttgactatcgtaaaagcaatagttctatagtcaataaacgttggttaggcgggtttattgttaggttgtctataatttgttcattgtttcttgagcgttttatcaaataaagcactaatgattatacttcgctgtccgacgcggtattttttgttgcggtttataatttgtttggcgatatgaatagttgaatttaccattttgtctttgaatatattattatcatttacaatcttatcaaacattccaattttattaggttataactattcatttttcgcttcaaaatctttcaataatattgtatttactcaaaaaaaaatagaagtgttgttcttgtgtgtaattcagcaaatgaatatgaatagagaaattaaaagtgaaatattccatagaaaaagattaagatgttgtatataaataaattatttaatggtttagttgcattatatcacatatgtgtttcttaacatatcaatatttttatgttctgaaatttaattggctaattttcatacatatttattaacctctaaaaaatattattatgaaaaagatttatgcattatgttcactcctattgatttgcataggagttttttctcaaactgaaagtcaagatgatggttatgtttctccatttgaaattatagaaaaggatctgcagttaggtgctaccgaatctgaattttacgttggatatggaaagaaacttaattttggtcataatggagataatatggatgatatacactttgtacggtataatattacattagatcagaccgatttcctactaaatgttggcgatgataataatgatagattcatgattggaagacaacattggagcgaggatttttttacccctcaatttatattcaaaacaaatggaaagatgggaattggaatttcagatccaacgacttcattagacataaatggtacaataagggctgatagcctattaattacaagcggcaatgtaggtattggcactgaaaaccctcaaaacaaacttgatgtaaatggaactatcagggcaaaagaaatcttggtagaatcaaattgggctgattttgtctttaagcaaaattataaattacctacattgagagaggtcgaagaacatataaaggagaaaggtagattgccgaatgtgccttctgagcaagaggttaaaaccaatggtatcaatgtaggagaaactaatgcgcttctactccagaaaatagaggaactgactttgtacgtgattcaacaacaaaaagcgatggagcagcaacaaaaagaaatagaagaattgaaatcaaaaattacccaatgaaaataaatactatgatgaaaaaatatattattttcatattcctgttattaaatagtctgagttccttctccgtagggaattctcttgtaggacctacaactgttgatccaggaacatactactcatatagagctaatttggatgggtgggatatcaatacggtagttcggtggaaaattaccaatggtcgttttaacaatgtaaatggtccaactgagctgaggcaggcaattgccgtgctctatgctgatgttgtgtgggatgataccacaaataaaggaactataaccgtagatatcaatggccctgttttgctccgcatcgaagtaaatataaacagtgtcaagaatatgtatattacagatttcagatacaatgggagtaaagctaccaatgatataataaaacttccgcttgggcaaacaggtatattggaatgcactgttccagaaatggcatatccgttaagcaaaaataaaatcacggagtttaagtgggaaactccaaagtcttggggtggaaaaacattctatagcggccggaccattaaagttaattataatgcaacatccggtaatggtgaaactataaaggttactcctcttggttttagaagtgttttgggtaatactaaaacaataacgattaaacgagagacgccaacatttgatggcaatattaagaatgtaaccatcacgtccaataaaacatataaacattctaagttgtatgctgaaaatgtaactataaggagcggtgcaaatgtcattatgaatggctataattccgtgaggatagtgccaggttttacagcagagttaggtagtactgttagaatatataatggtacagcttcaaattcgatgactagaggtattatggatgagaacaataatatagacgataaaatggtaaaagacaaaaaagatgccagaatggaacaaaataatcctaatccggctaaaggaagtactgctataaactgttatatccctttagagacggtcaatgcttatatccaaatatacaacactatgggaggaatggttctaaaattgccaataggaacaaaaggacaaaatgagatatatgtagatacttataaattgcctaatggaatttatatttattcattggtaacagatggtcgtttgattgatacaaaaagaatgatcatagctaattaacgaaaatacaggtccgaaattaataaaagctggctgattcattaacgaatcagtcggcttttattcaaagaaagcattgtaccattctgcattgtttataaattgttgaaaagaaaaatgccctgaaactggcttatatccgagatttacgttacttttgcagcatgattgaattggcacaacatatagaagctttgttattggaaaatgactgcgtcattgttccgggtttgggaggatttgttgctcattacgcttcggctacaagagtgaaagaagaaaatattttcctgccccctacccgtattatcggctttaatccgcaattgaagatgaatgacggtttgctagtacagtcttatatgtctgtgtatggaaccaatttctctgatgctaccaagatggtagaacgtaaagtggacgaattaatagccacgttgcacgaagacggtaaggttgatttgccgaatgttggcgaagtacgttacactattcataacaccttcgacttcgcaccttatgataataagatcacaactccctatttatatgggctggatgcatttgagatgcaggaattgtctgctttggaaaaaccgtcgaccgagaacgttgccgcttattcagtgcctgccgctatcaaaaaggaaaaacgtactttctccatcaagtttaaccgtgcatatctgactaatgctgccgcagtggtagctgcaattgtgctttctttcttcttttccactccgatagagaatacggaagtggtggaagaaaattatgcaaagctattaccggatgagctgtttgagaaaatagaaaagcaatctttggctattacaccgattgttgtaaagcagaatactcccacccgcaaatcagctaacaagcaaaaagggacacaaaagaaagtggtagcgcctgttgcggttagagaagtcaaagttggtaaaacatcggctgtatctacagaagctcaagctaagactgagacttctaaagcagttgtaacttctgagactcctaaacaaaacgctcaacctattgctgctaaacagtccgttgccactcctaaaagaccctatcatattatcattgctagcgtgggcacagaacaagatgcagaagcaatggcagcccagctggttgcaaaaggcttctccactgcaaaagcgattgttggagacggcaaaatgcgtgtcagcattgaatcttgcggaacagaagtggaagcttatcaggctttggcaagaattcgccaaaatgagatgtacaaaaatgcttgggtgctgaagaagtgataattcttaaatttttaatcttatgaagcgtatccgttgtcctaaatgtgagaattatcttttgttcgatgaaacaaaatacagcgaaggtcagtcattggtcttcgtttgtgagcattgtggcaagcagtttagtattcgtctgggaaagacaaagatgcgtgctccgcaaaaggaagaacgccctgatgaagaagaatttaaagatgcttttggcagtattacggtgattgagaatgtgtttggcttcaaacaagtgcttcctttgcaggaaggtgacaatgtaattggccgtcgctgtgtgggaaccaatatcaatactcctattgaaacgtcggacatgagtatggatcgccgtcactgcattattaatgtgaagcgaaataagcaaggcaaacttgtttatactctacaagatgcccccagtctgaccggaacttttctgaataatgaaatactgggagataaagaccgtatccgtattgaggacggggctatcgttactatcggggccacaacattcatattacggggagcagaataaaaagaaaattctcataacactattttctaaaaggaacctacatcatacaccgaaacgattaagtcgttaatttacaagttgatatatgatgtaggaaagtatgtagaaaggtgtaggaagcctgccttcctacaccacaattttactgaaatcacaactttatcacttcgtatatcatccctttcttagttcgtttggactgaatctggtttcttttcaaaatacgtccaaatgtagttatactgctttgagacagattaatagccttgttcttctcttgtagatattcaataatctgcatggcggacaattgttctcccgtctctccttcttccggtgaacgaaaatgacaatggaaaagttgctccagcggactgatttgttcgaattcccggttagattccttcagaattgcttcgtctgtgtcatcaaaccagtaacgttctcctttcgtgatagcctccattgcttgtgcatacagttgacggtagttgatggtaacgtttgtattgatggctgccgttacctcgatacagataaaacggcggctaccactcggatcagtcagcaaatctttttggttactggtacctatgaatgaagcataacgtcgcatctcctgaatactactgccataaggtttgcgcagattggctacaggcttctgtaacagatgttttagaaaaccttgctgattcatgctgacctggtcaaactcatcaatgttgatcagcataaaacgccccagatacatttcggcatcccgcttatttctgaaatccaggctgtccgtatagccgaaacgaagttcgggcggaagaatgatccggcaataggttgattttcgaaaaccttgagcaccgactaaaagaggcgatgtgctgttggcatgctgtttgttgagcccccgccagtgagccaccatgttcagaaaccaacggtagaagagttgacgccagtgtggattattgcaaggcacgaggtcggcaagcgcatgaatacgatctttaccgtcccaacgccctacgctgcacagataatcttctaccggattgtatagtggcacacggttggacgccagatagcggtttacatcccggtcccacactttgatgccttcttgcagggcatccattgatatgctgttccgtgcccgttggtcaacaggctggaagtagaagtgaatgaagtccttttgacgaaattccagatcattgctgacggtattaaaacggaattcatatctacgtcccatgaatttctccaattgcagtgagattttttgttctggtgtcagggctgacttcttaccgaatcctttgcattcacgatacagattgtggatggttatcctgacatcctgttcgtctgcctgtctgtaatagtgtatcataacctgacgtacggtttcttcttccggtatccctgctttgaagcaattttcggccaggcacaccagcagcggatgcaaggtatctccccgcttccagttctgcatttcatccaatgccttgccgagggttgtttcaaacagtatggtgaaggtttctgatgtctcaaatccgggtttcagtcttagcaacggattcttttccgtcaatttccgttggtggaaagtctgttcaccgggcatgctgaacggctgctcctggcagaaagctatggcgtcaggattgaaataaggatcagtgtccagtgtcatacggcagctttgtgcggggttaggttctttcaaggttatgggaaacggcagtatgggttgatagcactgcacagccatacgataagcgcaggcatgaaagagagtgatattctcctcttttacagggaggtttccgtcgggaagcacgaatttcacccatatctttacgctccgtccgctgcttccggtaatagcagcccaagtttgcggtaataatcttgcctgctctttcactagttctacttctgacaatccggccaggccatttacttcgagcattactatgccattgtagcgcttcagctttctgcctccatcgcggcttcttccatattctacagccggataaatgcgtggcaatttatcaatgtgctcgtagtgaccacgagcatcaggggtggtatatagtagcatggtccgtagtgcggtgacgtgtgctgctttagtttctgtctttatccgttccaataatacatctgcctcgcaggtgctgacggcttctctcccactctctttttcttctctgacaagggttattttcatttgtgtgtttatttaaaaaataatttattcctaagaaccttttcctaagagactgcaaggtaggtataaaatgcgtttaaaacaaataaatcaggcttttgttaagcggtaacaccccttttttgttcatcataaagcaatcataaaaattgaaatatagttggtagaaaacttgactttcccttattgtttttgtatctttgtcagtagcaaaacttcgtcccgcaattgcgggacgaacagttctcggctgtgggctgtgcatcctacaattgcaggaggtacagcccacaattgaaaaacaaagtttagcttatagcttactgatattttccttaatgcaaaagaggaaaaggaaaggggcaaatgatgatttagtaacttaataacatagcattatggcagcagaatatgattttcggagacgcccgaacccgaagggtgacggcgaattacaacctttgtacccacgtatcgtaaataagggtactattgaaatggagcgcttggttcaggatatagccgatatgtccagcttcactcccggtgatgtgaagggcgtggtggctttgcttgaggaccgtatttcctattacctgtccgaaggacatcatgtacagttaggtgatatcggatatttttcggcaagcttgcaagcccgtccggtaatggatcccaaagagattcattcgcaaactattttctttggcaaagtacacctgcgtgtgtctcccgatttccggaaacgctgtgcgggctatgtagaacgtgccaaatatggtttccgaaaaagcgcagaacttagcggtgcggagcgttatcgccgtttgctggcttttttggagacacatcctttcattacccgtcatgattatagcggaattacaggacttttgaagaataaagcattgaatgacctcaatttgcttgtagaaaaggggtatttgaatacagtggggcaaggttcgcacaaagtgtatgtacgggctgataataaggaggttacagaataaaaaacgtgttttttatgaatttcggggtgtaggaagagggttttatacatctgcctacacccttttatacaccatatatttgcttgatattcaatggagtataatcatgggtgtaggatgtaggaaacaacgtctaaaaaacgggttcttcgtcacttttggtggtaaatagtcataatccgtaaataactttcgctctcaacaattctattcctgctctgttatacattgtcctctttatgcatttaattctattaaccgtcccttcgagtaatgcattgctgtattcggtttgccttgcagcctttaccgcttgcttatcatcttctatattcgctgcgaatttagcgatagccttgcattttgcttttttcgctttcttcatccattcatccagagtagtgtctgcctctactcccttcagtattttcctgaagtctatgcataggtccaccgcgtgtgcaatggcttcatttgatttcatttttagatcaaacttctcatccttggttttccctttgaggagaaactccctaatgagggctacctttaccttctttttgatctttgactt
